(19) United States
(12) Patent Application Publication
(10) Pub. No.: US 2025/0163162 A1
(43) Pub. Date: May 22, 2025

(54) COMPOSITIONS AND METHODS RELATED TO RECEPTOR PAIRING

(71) Applicant: Synthekine, Inc., Menlo Park, CA (US)

(72) Inventors: Robert Kastelein, Menlo Park, CA (US); Sandro Vivona, Menlo Park, CA (US); Deepti Rokkam, Menlo Park, CA (US); Patrick Lupardus, Menlo Park, CA (US); Mahalakshmi Ramadass, Menlo Park, CA (US)

(21) Appl. No.: 18/260,688

(22) PCT Filed: Jan. 11, 2022
(86) PCT No.: PCT/US2022/012049

§ 371 Date: Jul. 7, 2023

Related U.S. Application Data
(63) Continuation-in-part of application No. PCT/US21/44858, filed on Aug. 6, 2021.
(60) Provisional application No. 63/136,098, filed on Jan. 11, 2021.
(60) Provisional application No. 63/135,884, filed on Jan. 11, 2021.

(51) Int. Cl. C07K 16/28; A61P 37/04

(52) U.S. Cl. CPC C07K 16/2866; A61P 37/04; C07K 2317/31; C07K 2317/524; C07K 2317/526; C07K 2317/53; C07K 2317/565; C07K 2317/569; C07K 2317/75; C07K 2319/00

(57) ABSTRACT

Provided herein are IL10Rα/IL2Rγ binding proteins that bind to IL10Rα and IL2Rγ and comprise an anti-IL10Rα V_{H}H antibody and an anti-IL2Rγ V_{H}H antibody.

### CROSS-REFERENCE TO RELATED PATENT APPLICATIONS

[0001] The present patent application claims benefit of priority to U.S. Provisional Patent Application No. 63/136,098, filed Jan. 11, 2021; U.S. Provisional Patent Application No. 63/135,884, filed Jan. 11, 2021 and PCT Patent Application No. PCT/US2021/044858, filed Aug. 6, 2021, each of which is incorporated by references.

### BACKGROUND OF THE DISCLOSURE

[0002] The binding of IL10 to the IL10 receptor (IL10R) can trigger both immunosuppressive and immunostimulatory effects on various cell types. IL10 can cause a number of adverse and undesirable effects by a variety of mechanisms resulting from, among other factors, the presence of IL10R on different cell types.

[0003] The anti-inflammatory cytokine interleukin-10 (IL-10), also known as human cytokine synthesis inhibitory factor (CSIF), is classified as a type(class)-2 cytokine, a set of cytokines that includes IL-19, IL-20, IL-22, IL-24 (Mda-7), and IL-26, interferons (IFN-α, -β, -γ, -δ, -ε, -κ, -Ω, and -τ) and interferon-like molecules (limitin, IL-28A, IL-28B, and IL-29). Human IL-10 is a homodimer with a molecular mass of 37 kDa, wherein each 18.5 kDa monomer comprises 178 amino acids, the first 18 of which comprise a signal peptide, and two cysteine residues that form two intramolecular disulfide bonds. The IL-10 receptor, a type II cytokine receptor, consists of alpha (IL10Ra) and beta (IL10Rb) subunits, which are also referred to as R1 and R2, respectively. Receptor activation requires binding to both alpha and beta. One homodimer of an IL-10 polypeptide binds to alpha and the other homodimer of the same IL-10 polypeptide binds to beta.

[0004] IL-10 exhibits pleiotropic effects in immunoregulation and inflammation through actions on T cells, B cells, macrophages, and antigen presenting cells (APC). IL-10 is produced by mast cells, counteracting the inflammatory effect that these cells have at the site of an allergic reaction. Although IL-10 is predominantly expressed in macrophages, expression has also been detected in activated T cells, B cells, mast cells, and monocytes. IL-10 can suppress immune responses by inhibiting expression of IL-1α, IL-1β, IL-6, IL8, TNFα, GM-CSF and G-CSF in activated monocytes and activated macrophages, and it also suppresses IFN-γ production by NK cells. IL10 can block NF-κB activity and is involved in the regulation of the JAK-STAT signaling pathway.

[0005] IL2 is a pluripotent cytokine which is produced by antigen activated T cells. IL2 exerts a wide spectrum of effects on the immune system and plays important roles in regulating both immune activation, suppression and homeostasis. IL2 promotes the proliferation and expansion of activated T lymphocytes, induces proliferation and activation of naïve T cells, potentiates B cell growth, and promotes the proliferation and expansion of NK cells. Human interleukin 2 (IL2) is a 4 alpha-helix bundle cytokine of 133 amino acids. IL2 is a member of the IL2 family of cytokines which includes IL2, IL-4, IL-7, IL 9, IL-15 and IL21.

[0006] IL2 exerts its effect on mammalian immune cells through interaction with three different cell surface proteins: (1) CD25 (also referred to as the IL2 receptor alpha, IL2Rα, p55), CD122 (also referred to as the interleukin-2 receptor beta, IL2Rβ, IL15Rβ and p70-75), and CD132 (also referred to as the interleukin 2 receptor gamma, IL2Rγ; or common gamma chain as it is a component of other multimeric receptors in the IL2 receptor family). In addition to the “low affinity” CD25 IL2 receptor, two additional IL2 receptor complexes have been characterized: (a) an “intermediate affinity” dimeric IL2 receptor comprising CD122 and CD132 (also referred to as “IL2Rβγ”), and (b) a “high affinity” trimeric IL2 receptor complex comprising the CD25, CD122 and CD132 proteins (also referred to as “IL2Rαβγ”). hIL2 possesses a Kd of approximately 10⁻⁹M with respect to the intermediate affinity CD122/CD132 (IL2βγ) receptor complex. hIL2 possesses a Kd of approximately 10⁻¹¹M with respect to the high IL2 affinity receptor complex.

[0007] In addition to forming a subunit of the high affinity IL2 receptor, CD132 is a type 1 cytokine receptor and is shared by the receptor complexes for IL-4, IL-7, IL-9, IL-15, and IL21, hence it being referred to in the literature as the “common” gamma chain. Human CD132 (hCD132) is expressed as a 369 amino acid pre-protein comprising a 22 amino acid N-terminal signal sequence. Amino acids 23-262 (amino acids 1-240 of the mature protein) correspond to the extracellular domain, amino acids 263-283 (amino acids 241-262 of the mature protein) correspond to the 21 amino acid transmembrane domain, and amino acids 284-369 (amino acids 262-347 of the mature protein) correspond to the intracellular domain. hCD132 is referenced at UniProtKB database as entry P31785. Human CD132 nucleic acid and protein sequences may be found as Genbank accession numbers: NM_000206 and NP_000197 respectively.

### SUMMARY OF THE DISCLOSURE

[0008] In one aspect, provided herein is an IL10Rα/IL2Rγ binding protein that specifically binds to IL10Rα and IL2Rγ, comprising an anti-IL10Rα V_{H}H antibody and an anti-IL2Rγ V_{H}H antibody.

[0009] In some embodiments, the IL10Rα/IL2Rγ binding protein that specifically binds to IL10Rα and IL2Rγ comprises an anti-IL10Rα VHH antibody and an anti-IL2Rγ VHH antibody, wherein,
[0010] (A) the anti-IL10Rα VHH antibody comprises a complementarity determining region 1 (CDR1) comprising an amino acid sequence of SEQ ID NO:1 or SEQ ID NO:264, a CDR2 comprising an amino acid sequence of SEQ ID NO:2, and a CDR3 comprising an amino acid sequence of SEQ ID NO:3; and
[0011] wherein the anti-IL2Rγ VHH antibody comprises:
[0012] i) a CDR1 comprising an amino acid sequence of SEQ ID NO:25 or SEQ ID NO:270, a CDR2 comprising an amino acid sequence of SEQ ID NO:26, and a CDR3 comprising an amino acid sequence of SEQ ID NO:27;
[0013] ii) a CDR1 comprising an amino acid sequence of SEQ ID NO:29 or SEQ ID NO:271, a CDR2 comprising an amino acid sequence of SEQ ID NO:30, and a CDR3 comprising an amino acid sequence of SEQ ID NO:31;
[0014] iii) a CDR1 comprising an amino acid sequence of SEQ ID NO:33 or SEQ ID NO:272, a CDR2 comprising an amino acid sequence of SEQ ID NO:34, and a CDR3 comprising an amino acid sequence of SEQ ID NO:35;
[0015] iv) a CDR1 comprising an amino acid sequence of SEQ ID NO:37 or SEQ ID NO:273, a CDR2 comprising an amino acid sequence of SEQ ID NO:38, and a CDR3 comprising an amino acid sequence of SEQ ID NO:39;
[0016] v) a CDR1 comprising an amino acid sequence of SEQ ID NO:41 or SEQ ID NO:274, a CDR2 comprising an amino acid sequence of SEQ ID NO:42, and a CDR3 comprising an amino acid sequence of SEQ ID NO:43; or
[0017] vi) a CDR1 comprising an amino acid sequence of SEQ ID NO:45 or SEQ ID NO:275, a CDR2 comprising an amino acid sequence of SEQ ID NO:46, and a CDR3 comprising an amino acid sequence of SEQ ID NO:47; or
[0018] (B) the anti-IL10Rα VHH antibody comprises a complementarity determining region 1 (CDR1) comprising an amino acid sequence of SEQ ID NO:5 or SEQ ID NO:265, a CDR2 comprising an amino acid sequence of SEQ ID NO:6, and a CDR3 comprising an amino acid sequence of SEQ ID NO:7; and
[0019] wherein the anti-IL2Rγ VHH antibody comprises:
[0020] i) a CDR1 comprising an amino acid sequence of SEQ ID NO:25 or SEQ ID NO:270, a CDR2 comprising an amino acid sequence of SEQ ID NO:26, and a CDR3 comprising an amino acid sequence of SEQ ID NO:27;
[0021] ii) a CDR1 comprising an amino acid sequence of SEQ ID NO:29 or SEQ ID NO:271, a CDR2 comprising an amino acid sequence of SEQ ID NO:30, and a CDR3 comprising an amino acid sequence of SEQ ID NO:31;
[0022] iii) a CDR1 comprising an amino acid sequence of SEQ ID NO:33 or SEQ ID NO:272, a CDR2 comprising an amino acid sequence of SEQ ID NO:34, and a CDR3 comprising an amino acid sequence of SEQ ID NO:35;
[0023] iv) a CDR1 comprising an amino acid sequence of SEQ ID NO:37 or SEQ ID NO:273, a CDR2 comprising an amino acid sequence of SEQ ID NO:38, and a CDR3 comprising an amino acid sequence of SEQ ID NO:39;
[0024] v) a CDR1 comprising an amino acid sequence of SEQ ID NO:41 or SEQ ID NO:274, a CDR2 comprising an amino acid sequence of SEQ ID NO:42, and a CDR3 comprising an amino acid sequence of SEQ ID NO:43; or
[0025] vi) a CDR1 comprising an amino acid sequence of SEQ ID NO:45 or SEQ ID NO:275, a CDR2 comprising an amino acid sequence of SEQ ID NO:46, and a CDR3 comprising an amino acid sequence of SEQ ID NO:47; or
[0026] (C) the anti-IL10Rα VHH antibody comprises a complementarity determining region 1 (CDR1) comprising an amino acid sequence of SEQ ID NO:9 or SEQ ID NO:266, a CDR2 comprising an amino acid sequence of SEQ ID NO:10, and a CDR3 comprising an amino acid sequence of SEQ ID NO: 11; and
[0027] wherein the anti-IL2Rγ VHH antibody comprises:
[0028] i) a CDR1 comprising an amino acid sequence of SEQ ID NO:25 or SEQ ID NO:270, a CDR2 comprising an amino acid sequence of SEQ ID NO:26, and a CDR3 comprising an amino acid sequence of SEQ ID NO:27;
[0029] ii) a CDR1 comprising an amino acid sequence of SEQ ID NO:29 or SEQ ID NO:271, a CDR2 comprising an amino acid sequence of SEQ ID NO:30, and a CDR3 comprising an amino acid sequence of SEQ ID NO:31;
[0030] iii) a CDR1 comprising an amino acid sequence of SEQ ID NO:33 or SEQ ID NO:272, a CDR2 comprising an amino acid sequence of SEQ ID NO:34, and a CDR3 comprising an amino acid sequence of SEQ ID NO:35;
[0031] iv) a CDR1 comprising an amino acid sequence of SEQ ID NO:37 or SEQ ID NO:273, a CDR2 comprising an amino acid sequence of SEQ ID NO:38, and a CDR3 comprising an amino acid sequence of SEQ ID NO:39;
[0032] v) a CDR1 comprising an amino acid sequence of SEQ ID NO:41 or SEQ ID NO:274, a CDR2 comprising an amino acid sequence of SEQ ID NO:42, and a CDR3 comprising an amino acid sequence of SEQ ID NO:43; or
[0033] vi) a CDR1 comprising an amino acid sequence of SEQ ID NO:45 or SEQ ID NO:275, a CDR2 comprising an amino acid sequence of SEQ ID NO:46, and a CDR3 comprising an amino acid sequence of SEQ ID NO:47; or
[0034] (D) the anti-IL10Rα VHH antibody comprises a complementarity determining region 1 (CDR1) comprising an amino acid sequence of SEQ ID NO:13 or SEQ ID NO:267, a CDR2 comprising an amino acid sequence of SEQ ID NO:14, and a CDR3 comprising an amino acid sequence of SEQ ID NO:15; and
[0035] wherein the anti-IL2Rγ VHH antibody comprises:
[0036] i) a CDR1 comprising an amino acid sequence of SEQ ID NO:25 or SEQ ID NO:270, a CDR2 comprising an amino acid sequence of SEQ ID NO:26, and a CDR3 comprising an amino acid sequence of SEQ ID NO:27;
[0037] ii) a CDR1 comprising an amino acid sequence of SEQ ID NO:29 or SEQ ID NO:271, a CDR2 comprising an amino acid sequence of SEQ ID NO:30, and a CDR3 comprising an amino acid sequence of SEQ ID NO:31;
[0038] iii) a CDR1 comprising an amino acid sequence of SEQ ID NO:33 or SEQ ID NO:272, a CDR2 comprising an amino acid sequence of SEQ ID NO:34, and a CDR3 comprising an amino acid sequence of SEQ ID NO:35;
[0039] iv) a CDR1 comprising an amino acid sequence of SEQ ID NO:37 or SEQ ID NO:273, a CDR2 comprising an amino acid sequence of SEQ ID NO:38, and a CDR3 comprising an amino acid sequence of SEQ ID NO:39;
[0040] v) a CDR1 comprising an amino acid sequence of SEQ ID NO:41 or SEQ ID NO:274, a CDR2 comprising an amino acid sequence of SEQ ID NO:42, and a CDR3 comprising an amino acid sequence of SEQ ID NO:43; or
[0041] vi) a CDR1 comprising an amino acid sequence of SEQ ID NO:45 or SEQ ID NO:275, a CDR2 comprising an amino acid sequence of SEQ ID NO:46, and a CDR3 comprising an amino acid sequence of SEQ ID NO:47; or
[0042] (E) the anti-IL10Rα VHH antibody comprises a complementarity determining region 1 (CDR1) comprising an amino acid sequence of SEQ ID NO:17 or SEQ ID NO:268, a CDR2 comprising an amino acid sequence of SEQ ID NO:18, and a CDR3 comprising an amino acid sequence of SEQ ID NO:19; and
[0043] wherein the anti-IL2Rγ VHH antibody comprises:
[0044] i) a CDR1 comprising an amino acid sequence of SEQ ID NO:25 or SEQ ID NO:270, a CDR2 comprising an amino acid sequence of SEQ ID NO:26, and a CDR3 comprising an amino acid sequence of SEQ ID NO:27;
[0045] ii) a CDR1 comprising an amino acid sequence of SEQ ID NO:29 or SEQ ID NO:271, a CDR2 comprising an amino acid sequence of SEQ ID NO:30, and a CDR3 comprising an amino acid sequence of SEQ ID NO:31;
[0046] iii) a CDR1 comprising an amino acid sequence of SEQ ID NO:33 or SEQ ID NO:272, a CDR2 comprising an amino acid sequence of SEQ ID NO:34, and a CDR3 comprising an amino acid sequence of SEQ ID NO:35;
[0047] iv) a CDR1 comprising an amino acid sequence of SEQ ID NO:37 or SEQ ID NO:273, a CDR2 comprising an amino acid sequence of SEQ ID NO:38, and a CDR3 comprising an amino acid sequence of SEQ ID NO:39;
[0048] v) a CDR1 comprising an amino acid sequence of SEQ ID NO:41 or SEQ ID NO:274, a CDR2 comprising an amino acid sequence of SEQ ID NO:42, and a CDR3 comprising an amino acid sequence of SEQ ID NO:43; or
[0049] vi) a CDR1 comprising an amino acid sequence of SEQ ID NO:45 or SEQ ID NO:275, a CDR2 comprising an amino acid sequence of SEQ ID NO:46, and a CDR3 comprising an amino acid sequence of SEQ ID NO:47; or
[0050] (F) the anti-IL10Rα VHH antibody comprises a complementarity determining region 1 (CDR1) comprising an amino acid sequence of SEQ ID NO:21 or SEQ ID NO:269, a CDR2 comprising an amino acid sequence of SEQ ID NO:22, and a CDR3 comprising an amino acid sequence of SEQ ID NO:23; and
[0051] wherein the anti-IL2Rγ VHH antibody comprises:
[0052] i) a CDR1 comprising an amino acid sequence of SEQ ID NO:25 or SEQ ID NO:270, a CDR2 comprising an amino acid sequence of SEQ ID NO:26, and a CDR3 comprising an amino acid sequence of SEQ ID NO:27;
[0053] ii) a CDR1 comprising an amino acid sequence of SEQ ID NO:29 or SEQ ID NO:271, a CDR2 comprising an amino acid sequence of SEQ ID NO:30, and a CDR3 comprising an amino acid sequence of SEQ ID NO:31;
[0054] iii) a CDR1 comprising an amino acid sequence of SEQ ID NO:33 or SEQ ID NO:272, a CDR2 comprising an amino acid sequence of SEQ ID NO:34, and a CDR3 comprising an amino acid sequence of SEQ ID NO:35;
[0055] iv) a CDR1 comprising an amino acid sequence of SEQ ID NO:37 or SEQ ID NO:273, a CDR2 comprising an amino acid sequence of SEQ ID NO:38, and a CDR3 comprising an amino acid sequence of SEQ ID NO:39;
[0056] v) a CDR1 comprising an amino acid sequence of SEQ ID NO:41 or SEQ ID NO:274, a CDR2 comprising an amino acid sequence of SEQ ID NO:42, and a CDR3 comprising an amino acid sequence of SEQ ID NO:43; or
[0057] vi) a CDR1 comprising an amino acid sequence of SEQ ID NO:45 or SEQ ID NO:275, a CDR2 comprising an amino acid sequence of SEQ ID NO:46, and a CDR3 comprising an amino acid sequence of SEQ ID NO:47.

[0058] In some embodiments, the anti-IL10Rα V_{H}H antibody comprises: (1) a complementarity determining region 1 (CDR1) having a sequence of any one of SEQ ID NOS:1, 5, 9, 13, 1, and 21; (2) a CDR2 having a sequence of any one of SEQ ID NOS:2, 6, 10, 14, 18, and 22; and (3) a CDR3 having a sequence of any one of SEQ ID NOS:3, 7, 11, 15, 19, and 23.

[0059] In some embodiments, the anti-IL10Rα V_{H}H antibody comprises CDR1, CDR2, and CDR3 sequences of an anti-IL10Rα V_{H}H antibody selected from the group consisting of DR235, DR236, DR237, DR239, DR240, and DR241. In some embodiments, the anti-IL10Rα V_{H}H antibody comprises a sequence having at least 90% (e.g., 90%, 91%, 92%, 93%, 94%, 95%, 96%, 97%, 98%, 99%, or 100%) identity to a sequence of any one of DR235 (SEQ ID NO:4), DR236 (SEQ ID NO:8), DR237 (SEQ ID NO:12), DR239 (SEQ ID NO:16), DR240 (SEQ ID NO:20), and DR241 (SEQ ID NO:24).

[0060] In some embodiments, the anti-IL10Rα V_{H}H antibody comprises: (1) a complementarity determining region 1 (CDR1) having a sequence of any one of SEQ ID NOS: 25, 29, 33, 37, 41, and 45; (2) a CDR2 having a sequence of any one of SEQ ID NOS: 26, 30, 34, 38, 42, and 46; and (3) a CDR3 having a sequence of any one of SEQ ID NOS: 27, 31, 35, 39, 43, and 47.

[0061] In some embodiments, the anti-IL2Rγ V_{H}H antibody comprises CDR1, CDR2, and CDR3 sequences of an anti-IL2Rγ V_{H}H antibody selected from the group consisting of DR229, DR230, DR231, DR232, DR233, and DR234. In some embodiments, the anti-IL10Rα V_{H}H antibody comprises a sequence having at least 90% (e.g., 90%, 91%, 92%, 93%, 94%, 95%, 96%, 97%, 98%, 99%, or 100%) identity to a sequence of any one of DR229 (SEQ ID NO:28), DR230 (SEQ ID NO:32), DR231 (SEQ ID NO:36), DR232 (SEQ ID NO:40), DR233 (SEQ ID NO:44), and DR234 (SEQ ID NO:48).

[0062] In some embodiments of this aspect, the anti-IL10Rα V_{H}H antibody is at the N-terminus and the anti-IL2Rγ V_{H}H antibody is at the C-terminus. In certain embodiments, the binding protein comprises a sequence having at least 90% (e.g., 90%, 91%, 92%, 93%, 94%, 95%, 96%, 97%, 98%, 99%, or 100%) identity to a sequence of any one of SEQ ID NOS:49-59.

[0063] In other embodiments, the anti-IL2Rγ V_{H}H antibody is at the N-terminus and the anti-IL10Rα V_{H}H antibody is at the C-terminus. In some embodiments, the binding protein comprises a sequence with at least 90% (e.g., 90%, 91%, 92%, 93%, 94%, 95%, 96%, 97%, 98%, 99%, or 100%) identity to a sequence of any one of SEQ ID NOS:60 and 61.

[0064] In some embodiments, the anti-IL10Rα V_{H}H antibody and the anti-IL2Rγ V_{H}H antibody are joined by a peptide linker. In certain embodiments, the peptide linker comprises between 1 and 50 amino acids.

[0065] In some embodiments, the binding protein comprises a sequence with at least 90% (e.g., 90%, 91%, 92%, 93%, 94%, 95%, 96%, 97%, 98%, 99%, or 100%) identity to a sequence of any one of SEQ ID NOS:49-61 or 96-179, optionally without a HHHHHH sequence.

[0066] In some embodiments of this aspect, the binding protein is conjugated to an Fc polypeptide or an Fc domain. In some embodiments, the Fc polypeptide or an Fc domain is from an IgG1, IgG2, IgG3 or IgG4. In some embodiments, the IL10Rα/IL2Rγ binding protein comprises SEQ ID NO: 556 or SEQ ID NO:558. In other embodiments, the binding protein is PEGylated.

[0067] Also provided is an IL10Rα/IL2Rγ binding protein that specifically binds to IL10Rα and IL2Rγ, comprising an anti-IL10Rα VHH antibody and an anti-IL2Rγ VHH antibody, wherein the IL10Rα/IL2Rγ binding protein is linked to a Fc polypeptide or a Fc domain from an IgG1, IgG2, IgG3 or IgG4.

[0068] Also provided is a heterodimeric IL10Rα binding protein/IL2Rγ binding protein pair, the heterodimeric IL10Rα binding protein/IL2Rγ binding protein pair comprising a first polypeptide of the formula #1:

anti-IL10Rα V_{H}H antibody-L1ₐ-UH1-Fc1 [1]

and a second polypeptide of the formula #2:

anti-IL2Rγ V_{H}H antibody-L2_{b}-UH2-Fc2 [2]

wherein:
[0069] L1 and L2 are GSA linkers and a and b are independently selected from 0 (absent) or 1 (present);
[0070] UH1 and UH2 are each an upper hinge domain of human immunoglobulin independently selected from the group consisting of the IgG1, IgG2, IgG3 and IgG4 upper hinge, optionally comprising the amino acid substitution C220S (EU numbering);
[0071] Fc1 is a polypeptide comprising the lower hinge, CH2 and CH3 domains of a human immunoglobulin selected from the group consisting of IgG1, IgG2, IgG3 and IgG4, comprising one or more amino acid substitutions promote heterodimerization with Fc2, and
[0072] FC2 is a polypeptide comprising the lower hinge, CH2 and CH3 domains of a human immunoglobulin selected from the group consisting of IgG1, IgG2, IgG3 and IgG4, comprising one or more amino acid substitutions promote heterodimerization with Fc1, and
   [0073] wherein the polypeptide of formula 1 and the polypeptide of formula 2 are linked by at least one interchain disulfide bond, and wherein
   [0074] (A) the anti-IL10Rα V_{H}H antibody comprises a complementarity determining region 1 (CDR1) comprising an amino acid sequence of SEQ ID NO:1 or SEQ ID NO:264, a CDR2 comprising an amino acid sequence of SEQ ID NO:2, and a CDR3 comprising an amino acid sequence of SEQ ID NO:3; and
   [0075] wherein the anti-IL2Rγ V_{H}H antibody comprises:
   [0076] i) a CDR1 comprising an amino acid sequence of SEQ ID NO:25 or SEQ ID NO:270, a CDR2 comprising an amino acid sequence of SEQ ID NO:26, and a CDR3 comprising an amino acid sequence of SEQ ID NO:27;
   [0077] ii) a CDR1 comprising an amino acid sequence of SEQ ID NO:29 or SEQ ID NO:271, a CDR2 comprising an amino acid sequence of SEQ ID NO:30, and a CDR3 comprising an amino acid sequence of SEQ ID NO:31;
   [0078] iii) a CDR1 comprising an amino acid sequence of SEQ ID NO:33 or SEQ ID NO:272, a CDR2 comprising an amino acid sequence of SEQ ID NO:34, and a CDR3 comprising an amino acid sequence of SEQ ID NO:35;
   [0079] iv) a CDR1 comprising an amino acid sequence of SEQ ID NO:37 or SEQ ID NO:273, a CDR2 comprising an amino acid sequence of SEQ ID NO:38, and a CDR3 comprising an amino acid sequence of SEQ ID NO:39;
   [0080] v) a CDR1 comprising an amino acid sequence of SEQ ID NO:41 or SEQ ID NO:274, a CDR2 comprising an amino acid sequence of SEQ ID NO:42, and a CDR3 comprising an amino acid sequence of SEQ ID NO:43; or
   [0081] vi) a CDR1 comprising an amino acid sequence of SEQ ID NO:45 or SEQ ID NO:275, a CDR2 comprising an amino acid sequence of SEQ ID NO:46, and a CDR3 comprising an amino acid sequence of SEQ ID NO:47; or
   [0082] (B) the anti-IL10Rα V_{H}H antibody comprises a complementarity determining region 1 (CDR1) comprising an amino acid sequence of SEQ ID NO:5 or SEQ ID NO:265, a CDR2 comprising an amino acid sequence of SEQ ID NO:6, and a CDR3 comprising an amino acid sequence of SEQ ID NO:7; and
   [0083] wherein the anti-IL2Rγ V_{H}H antibody comprises:
   [0084] i) a CDR1 comprising an amino acid sequence of SEQ ID NO:25 or SEQ ID NO:270, a CDR2 comprising an amino acid sequence of SEQ ID NO:26, and a CDR3 comprising an amino acid sequence of SEQ ID NO:27;
   [0085] ii) a CDR1 comprising an amino acid sequence of SEQ ID NO:29 or SEQ ID NO:271, a CDR2 comprising an amino acid sequence of SEQ ID NO:30, and a CDR3 comprising an amino acid sequence of SEQ ID NO:31;
   [0086] iii) a CDR1 comprising an amino acid sequence of SEQ ID NO:33 or SEQ ID NO:272, a CDR2 comprising an amino acid sequence of SEQ ID NO:34, and a CDR3 comprising an amino acid sequence of SEQ ID NO:35;
   [0087] iv) a CDR1 comprising an amino acid sequence of SEQ ID NO:37 or SEQ ID NO:273, a CDR2 comprising an amino acid sequence of SEQ ID NO:38, and a CDR3 comprising an amino acid sequence of SEQ ID NO:39;
   [0088] v) a CDR1 comprising an amino acid sequence of SEQ ID NO:41 or SEQ ID NO:274, a CDR2 comprising an amino acid sequence of SEQ ID NO:42, and a CDR3 comprising an amino acid sequence of SEQ ID NO:43; or
   [0089] vi) a CDR1 comprising an amino acid sequence of SEQ ID NO:45 or SEQ ID NO:275, a CDR2 comprising an amino acid sequence of SEQ ID NO:46, and a CDR3 comprising an amino acid sequence of SEQ ID NO:47; or
   [0090] (C) the anti-IL10Rα V_{H}H antibody comprises a complementarity determining region 1 (CDR1) comprising an amino acid sequence of SEQ ID NO:9 or SEQ ID NO:266, a CDR2 comprising an amino acid sequence of SEQ ID NO:10, and a CDR3 comprising an amino acid sequence of SEQ ID NO:11; and
   [0091] wherein the anti-IL2Rγ V_{H}H antibody comprises:
   [0092] i) a CDR1 comprising an amino acid sequence of SEQ ID NO:25 or SEQ ID NO:270, a CDR2 comprising an amino acid sequence of SEQ ID NO:26, and a CDR3 comprising an amino acid sequence of SEQ ID NO:27;
   [0093] ii) a CDR1 comprising an amino acid sequence of SEQ ID NO:29 or SEQ ID NO:271, a CDR2 comprising an amino acid sequence of SEQ ID NO:30, and a CDR3 comprising an amino acid sequence of SEQ ID NO:31;
   [0094] iii) a CDR1 comprising an amino acid sequence of SEQ ID NO:33 or SEQ ID NO:272, a CDR2 comprising an amino acid sequence of SEQ ID NO:34, and a CDR3 comprising an amino acid sequence of SEQ ID NO:35;
   [0095] iv) a CDR1 comprising an amino acid sequence of SEQ ID NO:37 or SEQ ID NO:273, a CDR2 comprising an amino acid sequence of SEQ ID NO:38, and a CDR3 comprising an amino acid sequence of SEQ ID NO:39;
   [0096] v) a CDR1 comprising an amino acid sequence of SEQ ID NO:41 or SEQ ID NO:274, a CDR2 comprising an amino acid sequence of SEQ ID NO:42, and a CDR3 comprising an amino acid sequence of SEQ ID NO:43; or
   [0097] vi) a CDR1 comprising an amino acid sequence of SEQ ID NO:45 or SEQ ID NO:275, a CDR2 comprising an amino acid sequence of SEQ ID NO:46, and a CDR3 comprising an amino acid sequence of SEQ ID NO:47; or
   [0098] (D) the anti-IL10Rα V_{H}H antibody comprises a complementarity determining region 1 (CDR1) comprising an amino acid sequence of SEQ ID NO:13 or SEQ ID NO:267, a CDR2 comprising an amino acid sequence of SEQ ID NO:14, and a CDR3 comprising an amino acid sequence of SEQ ID NO:15; and
   [0099] wherein the anti-IL2Rγ V_{H}H antibody comprises:
   [0100] i) a CDR1 comprising an amino acid sequence of SEQ ID NO:25 or SEQ ID NO:270, a CDR2 comprising an amino acid sequence of SEQ ID NO:26, and a CDR3 comprising an amino acid sequence of SEQ ID NO:27;
   [0101] ii) a CDR1 comprising an amino acid sequence of SEQ ID NO:29 or SEQ ID NO:271, a CDR2 comprising an amino acid sequence of SEQ ID NO:30, and a CDR3 comprising an amino acid sequence of SEQ ID NO:31;
   [0102] iii) a CDR1 comprising an amino acid sequence of SEQ ID NO:33 or SEQ ID NO:272, a CDR2 comprising an amino acid sequence of SEQ ID NO:34, and a CDR3 comprising an amino acid sequence of SEQ ID NO:35;
   [0103] iv) a CDR1 comprising an amino acid sequence of SEQ ID NO:37 or SEQ ID NO:273, a CDR2 comprising an amino acid sequence of SEQ ID NO:38, and a CDR3 comprising an amino acid sequence of SEQ ID NO:39;
   [0104] v) a CDR1 comprising an amino acid sequence of SEQ ID NO:41 or SEQ ID NO:274, a CDR2 comprising an amino acid sequence of SEQ ID NO:42, and a CDR3 comprising an amino acid sequence of SEQ ID NO:43; or
   [0105] vi) a CDR1 comprising an amino acid sequence of SEQ ID NO:45 or SEQ ID NO:275, a CDR2 comprising an amino acid sequence of SEQ ID NO:46, and a CDR3 comprising an amino acid sequence of SEQ ID NO:47; or
   [0106] (E) the anti-IL10Rα V_{H}H antibody comprises a complementarity determining region 1 (CDR1) comprising an amino acid sequence of SEQ ID NO:17 or SEQ ID NO:268, a CDR2 comprising an amino acid sequence of SEQ ID NO:18, and a CDR3 comprising an amino acid sequence of SEQ ID NO:19; and
   [0107] wherein the anti-IL2Rγ V_{H}H antibody comprises:
   [0108] i) a CDR1 comprising an amino acid sequence of SEQ ID NO:25 or SEQ ID NO:270, a CDR2 comprising an amino acid sequence of SEQ ID NO:26, and a CDR3 comprising an amino acid sequence of SEQ ID NO:27;
   [0109] ii) a CDR1 comprising an amino acid sequence of SEQ ID NO:29 or SEQ ID NO:271, a CDR2 comprising an amino acid sequence of SEQ ID NO:30, and a CDR3 comprising an amino acid sequence of SEQ ID NO:31;
   [0110] iii) a CDR1 comprising an amino acid sequence of SEQ ID NO:33 or SEQ ID NO:272, a CDR2 comprising an amino acid sequence of SEQ ID NO:34, and a CDR3 comprising an amino acid sequence of SEQ ID NO:35;
   [0111] iv) a CDR1 comprising an amino acid sequence of SEQ ID NO:37 or SEQ ID NO:273, a CDR2 comprising an amino acid sequence of SEQ ID NO:38, and a CDR3 comprising an amino acid sequence of SEQ ID NO:39;
   [0112] v) a CDR1 comprising an amino acid sequence of SEQ ID NO:41 or SEQ ID NO:274, a CDR2 comprising an amino acid sequence of SEQ ID NO:42, and a CDR3 comprising an amino acid sequence of SEQ ID NO:43; or
   [0113] vi) a CDR1 comprising an amino acid sequence of SEQ ID NO:45 or SEQ ID NO:275, a CDR2 comprising an amino acid sequence of SEQ ID NO:46, and a CDR3 comprising an amino acid sequence of SEQ ID NO:47; or
   [0114] (F) the anti-IL10Rα V_{H}H antibody comprises a complementarity determining region 1 (CDR1) comprising an amino acid sequence of SEQ ID NO:21 or SEQ ID NO:269, a CDR2 comprising an amino acid sequence of SEQ ID NO:22, and a CDR3 comprising an amino acid sequence of SEQ ID NO:23; and
   [0115] wherein the anti-IL2Rγ V_{H}H antibody comprises:
   [0116] i) a CDR1 comprising an amino acid sequence of SEQ ID NO:25 or SEQ ID NO:270, a CDR2 comprising an amino acid sequence of SEQ ID NO:26, and a CDR3 comprising an amino acid sequence of SEQ ID NO:27;
   [0117] ii) a CDR1 comprising an amino acid sequence of SEQ ID NO:29 or SEQ ID NO:271, a CDR2 comprising an amino acid sequence of SEQ ID NO:30, and a CDR3 comprising an amino acid sequence of SEQ ID NO:31;
   [0118] iii) a CDR1 comprising an amino acid sequence of SEQ ID NO:33 or SEQ ID NO:272, a CDR2 comprising an amino acid sequence of SEQ ID NO:34, and a CDR3 comprising an amino acid sequence of SEQ ID NO:35;
   [0119] iv) a CDR1 comprising an amino acid sequence of SEQ ID NO:37 or SEQ ID NO:273, a CDR2 comprising an amino acid sequence of SEQ ID NO:38, and a CDR3 comprising an amino acid sequence of SEQ ID NO:39;
   [0120] v) a CDR1 comprising an amino acid sequence of SEQ ID NO:41 or SEQ ID NO:274, a CDR2 comprising an amino acid sequence of SEQ ID NO:42, and a CDR3 comprising an amino acid sequence of SEQ ID NO:43; or
   [0121] vi) a CDR1 comprising an amino acid sequence of SEQ ID NO:45 or SEQ ID NO:275, a CDR2 comprising an amino acid sequence of SEQ ID NO:46, and a CDR3 comprising an amino acid sequence of SEQ ID NO:47; or
   [0122] (G) the anti-IL10Rα V_{H}H antibody comprises:
   [0123] a CDR1 having at least 90% (e.g., 91%, 92%, 93%, 94%, 95%, 96%, 97%, 98%, 99%, or 100%) sequence identity, or having 0, 1, 2, or 3 amino acid changes, optionally conservative amino acid changes relative, to the sequence of any CDR1 in a row of Table 10;
   [0124] a CDR2 having at least 90% (e.g., 91%, 92%, 93%, 94%, 95%, 96%, 97%, 98%, 99%, or 100%) sequence identity, or having 0, 1, 2, or 3 amino acid changes, optionally conservative amino acid changes relative, to the sequence of any CDR2 in a row of Table 10; and
   [0125] a CDR3 having at least 90% (e.g., 91%, 92%, 93%, 94%, 95%, 96%, 97%, 98%, 99%, or 100%) sequence identity, or having 0, 1, 2, or 3 amino acid changes, optionally conservative amino acid changes relative, to the sequence of any CDR3 listed in Table 10; and
   [0126] the anti-IL2Rγ V_{H}H antibody comprises:
   [0127] a CDR1 having at least 90% (e.g., 91%, 92%, 93%, 94%, 95%, 96%, 97%, 98%, 99%, or 100%) sequence identity, or having 0, 1, 2, or 3 amino acid changes, optionally conservative amino acid changes relative, to the sequence of any CDR1 listed in Table 11 or Table 12;
   [0128] a CDR2 having at least 90% (e.g., 91%, 92%, 93%, 94%, 95%, 96%, 97%, 98%, 99%, or 100%) sequence identity, or having 0, 1, 2, or 3 amino acid changes, optionally conservative amino acid changes relative, to the sequence of any CDR2 listed in Table 11 or Table 12; and
   [0129] a CDR3 having at least 90% (e.g., 91%, 92%, 93%, 94%, 95%, 96%, 97%, 98%, 99%, or 100%) sequence identity, or having 0, 1, 2, or 3 amino acid changes, optionally conservative amino acid changes relative, to the sequence of any CDR3 listed in Table 11 or Table 12.

[0130] In another aspect, the disclosure provides an isolated nucleic acid encoding the IL10Rα/IL2Rγ binding protein or a heterodimeric IL10Rα binding protein/IL2Rγ binding protein pair described herein.

[0131] In another aspect, the disclosure provides an expression vector comprising the nucleic acid described herein.

[0132] In another aspect, the disclosure provides an isolated host cell comprising the vector comprising the nucleic acid described herein.

[0133] In another aspect, the disclosure provides a pharmaceutical composition comprising the IL10Rα/IL2Rγ binding protein or a heterodimeric IL10Rα binding protein/IL2Rγ binding protein pair described herein and a pharmaceutically acceptable carrier.

[0134] In another aspect, the disclosure provides a method of treating a neoplastic disease in a subject in need thereof, comprising administering to the subject a therapeutically effective amount of an IL10Rα/IL2Rγ binding protein or a heterodimeric IL10Rα binding protein/IL2Rγ binding protein pair described herein or a pharmaceutical composition comprising the IL10Rα/IL2Rγ binding protein or a heterodimeric IL10Rα binding protein/IL2Rγ binding protein pair described herein and a pharmaceutically acceptable carrier.

[0135] In some embodiments, the method further comprises the administration of a supplementary agent to the subject. In some embodiments, the supplementary agent is selected from the group consisting of a chemotherapeutic agent, an antibody, an immune checkpoint modulators, a TIL, a CAR-T cell, and a physical method.

[0136] In some embodiments of this aspect, the neoplastic disease is selected from the group consisting of adenomas, fibromas, hemangiomas, hyperplasia, atypia, metaplasia, dysplasia, carcinomas, leukemias, breast cancers, sarcomas, leukemias, lymphomas, genitourinary cancers, ovarian cancers, urethral cancers, bladder cancers, prostate cancers, gastrointestinal cancers, colon cancers, esophageal cancers, stomach cancers, lung cancers; myelomas; pancreatic cancers; liver cancers; kidney cancers; endocrine cancers; skin cancers; gliomas, neuroblastomas, astrocytomas, myelodysplastic disorders; cervical carcinoma-in-situ; intestinal polyposes; oral leukoplakias; histiocytoses, hyperprofroliferative scars including keloid scars, respiratory system carcinomas, gastrointestinal system carcinomas, genitourinary system carcinomas, testicular carcinomas, breast carcinomas, prostatic carcinomas, endocrine system carcinomas, melanomas, adenocarcinomas, myeloproliferative neoplasms, myeloid and lymphoid disorders with eosinophilia, myeloproliferative/myelodysplastic neoplasms, myelodysplastic syndromes, acute myeloid leukemia and related precursor neoplasms, and acute leukemia of ambiguous lineage, promyeloid leukemia (APML), acute myelogenous leukemia (AML) and chronic myelogenous leukemia (CML), precursor lymphoid neoplasms, mature B-cell neoplasms, mature T-cell neoplasms, Hodgkin's Lymphoma, and immunodeficiency-associated lymphoproliferative disorders, lymphoblastic leukemia (ALL) which includes B-lineage ALL and T-lineage ALL, chronic lymphocytic leukemia (CLL), prolymphocytic leukemia (PLL), hairy cell leukemia (HLL) and Waldenstrom's macroglobulinemia (WM). erythroblastic leukemia and acute megakaryoblastic leukemia, malignant lymphomas including, but are not limited to, non-Hodgkins lymphoma and variants thereof, peripheral T cell lymphomas, adult T-cell leukemia/lymphoma (ATL), cutaneous T cell lymphoma (CTCL), large granular lymphocytic leukemia (LGF), Hodgkin's disease and Reed-Stemberg disease.

[0137] In another aspect, the disclosure provides a method of treating an autoimmune or inflammatory disease, disorder, or condition in a subject in need thereof, comprising administering to the subject a therapeutically effective amount of an IL10Rα/IL2Rγ binding protein described herein or a pharmaceutical composition comprising the IL10Rα/IL2Rγ binding protein described herein and a pharmaceutically acceptable carrier.

[0138] In some embodiments of this aspect, the method further comprises administering one or more supplementary agents selected from the group consisting of a corticosteroid, a Janus kinase inhibitor, a calcineurin inhibitor, a mTor inhibitor, an IMDH inhibitor, a biologic, a vaccine, and a therapeutic antibody. In certain embodiments, the therapeutic antibody is an antibody that binds a protein selected from the group consisting of BLyS, CD11a, CD20, CD25, CD3, CD52, IgEIL12/IL23, IL17a, IL1β, IL4Rα, IL5, IL6R, integrin-α4β7, RANKL, TNFα, VEGF-A, and VLA-4.

[0139] In some embodiments of this aspect, the disease, disorder or condition is selected from viral infections, Heliobacter pylori infection, HTLV, organ rejection, graft versus host disease, autoimmune thyroid disease, multiple sclerosis, allergy, asthma, neurodegenerative diseases including Alzheimer's disease, systemic lupus erythramatosis (SLE), autoinflammatory diseases, inflammatory bowel disease (IBD), Crohn's disease, diabetes, cartilage inflammation, arthritis, rheumatoid arthritis, juvenile arthritis, juvenile rheumatoid arthritis, juvenile rheumatoid arthritis, polyarticular juvenile rheumatoid arthritis, systemic onset juvenile rheumatoid arthritis, juvenile ankylosing spondylitis, juvenile enteropathic arthritis, juvenile reactive arthritis, juvenile Reiter's Syndrome, SEA Syndrome, juvenile dermatomyositis, juvenile psoriatic arthritis, juvenile scleroderma, juvenile systemic lupus erythematosus, juvenile vasculitis, pauciarticular rheumatoidarthritis, polyarticular rheumatoidarthritis, systemic onset rheumatoidarthritis, ankylosing spondylitis, enteropathic arthritis, reactive arthritis, Reiter's syndrome, SEA Syndrome, psoriasis, psoriatic arthritis, dermatitis (eczema), exfoliative dermatitis or atopic dermatitis, pityriasis rubra pilaris, pityriasis rosacea, parapsoriasis, pityriasis lichenoiders, lichen planus, lichen nitidus, ichthyosiform dermatosis, keratodermas, dermatosis, alopecia areata, pyoderma gangrenosum, vitiligo, pemphigoid, urticaria, prokeratosis, rheumatoid arthritis; seborrheic dermatitis, solar dermatitis; seborrheic keratosis, senile keratosis, actinic keratosis, photo-induced keratosis, keratosis follicularis; acne vulgaris; keloids; nevi; warts including verruca, condyloma or condyloma acuminatum, and human papilloma viral (HPV) infections.

[0140] In certain embodiments, the methods described herein do not cause anemia.

[0141] In another aspect, the disclosure provides a method to selectively induce activity (e.g., phosphorylation) in one or more of a first cell type over one or more of a second cell type, comprising contacting a population of cells comprising both the first and second cell types with an IL10Rα/IL2Rγ binding protein or a heterodimeric IL10Rα binding protein/IL2Rγ binding protein pair described herein, thereby selectively inducing activity in one or more of the first cell type over one or more of the second cell type.

[0142] In some embodiments, the first cell type is CD4⁺ T cells. In some embodiments, the first cell type is CD8⁺ T cells. In some embodiments, the second cell type is NK cells. In some embodiments, the second cell type is B cells. In some embodiments, the second cell type is monocytes. In some embodiments, the first cell type is CD4⁺ T cells, CD8⁺ T cells, B cells, and/or NK cells. In certain embodiments, the second cell type is monocytes.

[0143] In other embodiments of this aspect, the activity of the first cell type is at least 1.2 (e.g., at least 1.4, 1.6, 1.8, 2, 2.2, 2.4, 2.6, 2.8, 3, 3.2, 3.4, 3.6, 3.8, 4, 6, 8, 10, 12, 14, 16, 18, or 20) fold more than the activity of the second cell type.

### BRIEF DESCRIPTION OF THE DRAWINGS

[0144] FIGS. 1A-1D show different configurations of one or two IL10Rα/IL2Rγ binding proteins conjugated to an Fc domain.

[0145] FIGS. 2A-2E show dot plots of screening data for IL10Rα/IL2Rγ binding proteins' induction of pSTAT3 activity in different cell types.

[0146] FIGS. 3A-3E show the dose-dependent induction of IL10Rβ/IL2Rγ binding proteins in different cell types.

[0147] FIG. 4 of the attached drawings provides a schematic representation of one embodiment of the bivalent binding molecule of the present disclosure comprising a first single domain antibody (1) and a second single domain antibody (3) and a linker (2) depicted as interacting with a cell membrane (10) associated heterodimeric receptor comprising a first receptor subunit comprising an extracellular domain (4), and transmembrane domain (5) and an intracellular domain (6) interaction of a bivalent binding molecule and a second first receptor subunit comprising an extracellular domain (7), and transmembrane domain (8) and an intracellular domain (9) wherein the intracellular domain of the first receptor (6) and the intracellular domain of the second receptor (9) on of a bivalent binding molecule are within a proximal distance (11).

[0148] FIG. 5 of the attached drawings provides a schematic representation of two illustrative configurations of bivalent binding molecules of the present disclosure. Panel A provides a schematic representation of an illustrative single polypeptide chain bivalent binding molecule comprising, from amino to carboxy, a first single domain antibody (1) and a second single domain antibody (3) and a linker (2). Panel B provides a schematic representation of a bivalent binding molecule comprising a first single domain antibody (1) and a second single domain antibody (3) and a linker (2) and a knob-into-hole Fc domain comprising a first subunit which is a Fc knob (13) and a second subunit which is a Fc hole (14) wherein the single domain antibody is stably associated with the Fc domain via a IgG hinge sequence (12).

[0149] FIG. 6 of the attached drawings provides a schematic representation of two illustrative configurations of bivalent binding molecules of the present disclosure. Panel A provides a schematic representation of an illustrative bivalent binding molecule comprising a first single domain antibody (1) and a second single domain antibody (3) and a linker (2). Panel B provides a schematic representation of a bivalent binding molecule comprising two polypeptide chains, the first polypeptide chain comprising (from amino to carboxy) a first single domain antibody (1), a linker sequence, a second single domain antibody (3), an IgG hinge sequence (12) and an Fc knob domain (13) and a second polypeptide comprising an Fc hole (14) wherein the first and second polypeptides are in stable association via the interaction of the knob-into-hole Fc domain.

[0150] FIG. 7, Panel A provides alternative schematic representations of configurations of the bivalent binding molecules of the present disclosure where one single domain antibody is attached to each subunit of a knob-into-hole Fc domain comprising two polypeptides, the first polypeptide comprising from amino to carboxy, a first single domain antibody (1), an IgG hinge sequence (12) and a Fc knob subunit (13), the second polypeptide comprising from amino to carboxy, a second single domain antibody (3), an IgG hinge sequence (12) and a Fc hole subunit (13), wherein the first and second single domain antibodies are in stable associate via the interaction of the knob-into-hole Fc domain.

[0151] FIG. 7, Panel B provides a schematic representations of a bivalent binding molecule the binding domains are single domain antibodies associated via transition metal coordinate covalent complex. As illustrated, the bivalent binding molecules comprises two polypeptide subunits: the first subunit comprising a first single domain antibody (1) is attached via a first linker (15) to a first chelating peptide (17) and second subunit comprising a second single domain antibody (3) is attached via a second linker (16) to a second chelating peptide (18), wherein the first chelating peptide (17) and second chelating peptide (18) form a coordinate covalent complex with a single transition metal ion (“M”). The transition metal ion may be in a kinetically labile or kinetically inert oxidation state.

[0152] FIGS. 8A-8E provide STAT3 response dose response data in various cell types with the indicated IL10Rα/IL2Rγ binding molecule test articles when tested on CD8 T cells (FIG. 8A), monocytes (FIG. 8B), CD4 T cells (FIG. 8C), B cells (FIG. 8D), and NK cells (FIG. 8E) as more fully described in the Examples.

[0153] FIGS. 9A-9E provide STAT3 response dose response data in various cell types with the A2 and H1 IL10Rα/IL2Rγ binding molecules and their Fc conjugated counterparts (H1Fc=DR992, SEQ ID NO:556 and A2 Fc=DR995, SEQ ID NO:558), when tested on CD8 T cells (FIG. 9A), monocytes (FIG. 9B), CD4 T cells (FIG. 9C), B cells (FIG. 9D), and NK cells (FIG. 9E) as more fully described in the Examples.

[0154] FIGS. 10A-10D provides the results a monocyte functional assay indicating levels of IL1b expression (FIG. 10A), IL6 (FIG. 10B), IL8 (FIG. 10C) and TNFα (FIG. 10D) in response to varying doses of the A2 and H1 IL10Rα/IL2Rγ binding molecules and their Fc conjugated counterparts (H1Fc=DR992, SEQ ID NO:556 and A2 Fc=DR995, SEQ ID NO:558) as more fully described in the Examples.

[0155] FIGS. 11A-11B provides the results CD8 T cell blast functional assay indicating levels of granzyme A expression (FIG. 11A) and Granzyme B expression (FIG. 11B) in response to varying doses of the A2 and H1 IL10Rα/IL2Rγ binding molecules and their Fc conjugated counterparts (H1Fc=DR992, SEQ ID NO:556 and A2 Fc=DR995, SEQ ID NO:558) as more fully described in the Examples.

### DETAILED DESCRIPTION OF THE DISCLOSURE

### I. Introduction

[0156] The present disclosure provides compositions useful in the pairing of cellular receptors to generate desirable effects useful in treatment of diseases. In general, binding proteins are provided that comprise a first domain that binds to IL10Rα (also referred to as IL10R1) and a second domain that binds to IL2Rγ, such that upon contacting with a cell expressing IL10Rα and IL2Rγ, the binding protein causes the functional association of IL10Rα and IL2Rγ, thereby resulting in functional dimerization of the receptors and downstream signaling.

[0157] Several advantages flow from the binding proteins described herein. Unlike IL10R's natural ligand, IL10, which can trigger both immunosuppressive and immunostimulatory effects on various cell types, the binding proteins described herein can decouple the immunosuppressive and immunostimulatory effects and selectively provide only the desired effect on the desired cell type(s). When IL10 is used as a therapeutic in mammalian, particularly human, subjects, it may also trigger a number of adverse and undesirable effects by a variety of mechanisms including the presence of IL10R on different cell types and the binding to IL10R on the different cell types may result in undesirable effects and/or undesired signaling on cells expressing the IL10 receptor. The present disclosure is directed to methods and compositions that modulate the multiple effects of IL10R binding so that desired therapeutic signaling occurs, particularly in a desired cellular or tissue subtype, while also minimizing undesired activity and/or intracellular signaling.

[0158] For example, it is known that IL10 has activities on macrophages (e.g., monocytes) and T cells (e.g., CD4⁺ T cells and CD8⁺ T cells). Macrophages is a cell type that expresses both IL10Rα and IL10Rβ receptors but when activated significantly can result in the phagocytosis of aging red blood cells and resulting in side effects such as anemia in patients receiving IL10 therapy. In some embodiments, the method provided herein uses a binding protein of the present disclosure that binds to IL10Rα and IL2Rγ resulting in the selective activation of T cells relative to activation of macrophages. The selective activation of T cells relative to macrophages is beneficial because IL10-activated macrophages and its associated side effect of anemia can be avoided. Binding proteins as described herein that provide for the selective substantial activation of T cells while providing a minimal activation of macrophages resulting in a molecule which retains the beneficial properties of an native IL10 ligand but results in diminished undesirable side effects relative to the native IL10 ligand.

[0159] In some embodiments, the binding molecule that specifically binds to IL10Rα and IL2Rγ has a reduced Eₘₐₓ compared to the Eₘₐₓ of IL10. Eₘₐₓ reflects the maximum response level in a cell type that can be obtained by a ligand (e.g., a binding protein described herein or the native cytokine (e.g., IL10)). In some embodiments, the binding protein that specifically binds to IL10Rα and IL2Rγ described herein has at least 1% (e.g., between 1% and 100%, between 10% and 100%, between 20% and 100%, between 30% and 100%, between 40% and 100%, between 50% and 100%, between 60% and 100%, between 70% and 100%, between 80% and 100%, between 90% and 100%, between 10% and 90%, between 10% and 80%, between 1% and 70%, between 1% and 60%, between 1% and 50%, between 1% and 40%, between 1% and 30%, between 1% and 20%, or between 1% and 10%) of the Eₘₐₓ caused by IL10. In some embodiments, by varying the linker length of the binding protein that specifically binds to IL10Rα and IL2Rγ, the Eₘₐₓ of the binding protein can be changed. The binding protein can cause Eₘₐₓ in the most desired cell types, for example, CD8⁺ T cells. In some embodiments, the Eₘₐₓ in CD8⁺ T cells caused by a binding protein that specifically binds to IL10Rα and IL2Rγ is between 1% and 100% (e.g., between 10% and 100%, between 20% and 100%, between 30% and 100%, between 40% and 100%, between 50% and 100%, between 60% and 100%, between 70% and 100%, between 80% and 100%, between 90% and 100%, between 1% and 90%, between 1% and 80%, between 1% and 70%, between 1% and 60%, between 1% and 50%, between 1% and 40%, between 1% and 30%, between 1% and 20%, or between 1% and 10%) of the Eₘₐₓ in other T cells caused by the binding protein. In other embodiments, the Eₘₐₓ of the binding protein that specifically binds to IL10Rα and IL2Rγ is greater (e.g., at least 1%, 5%, 10%, 15%, 20%, 25%, 30%, 35%, 40%, 45%, or 50% greater) than the Eₘₐₓ of the natural ligand.

[0160] The level of downstream signaling caused by the binding protein, can also be measured.

[0161] In some embodiments, the IL10Rα/IL2Rγ binding molecules described herein are partial agonists. In some embodiments, the binding molecules described herein are designed such that the binding molecules are full agonists. In some embodiments, the binding molecules described herein are designed such that the binding molecules are super agonists.

[0162] The present disclosure provides disclosure provides bivalent IL10Rα/IL2Rγ comprising:
[0163] a first single domain antibody (sdAb) that specifically binds to the extracellular domain of IL10Rα of the IL10Rα/IL2Rγ (an “anti-IL1Rα sdAb”), and
[0164] a second single domain antibody that specifically binds to extracellular domain IL2Rγ of the IL10Rα/IL2Rγ ((an “anti-IL2Rγ sdAb”),
   wherein the anti-IL10Rα sdAb and anti-IL2Rγ sdAb are stably associated, and wherein contacting a cell expressing IL10Rα and IL2Rγ with an effective amount of the bivalent binding molecule results in the dimerization of IL10Rα and IL2Rγ and results in intraceullar signaling. In some embodiments, one or both of the sdAbs is a an scFv. In some embodiments, one or both of the sdAbs is a VHH.

[0165] In some embodiments, one sdAb of the IL10Rα/IL2Rγ bivalent binding molecule is an scFv and the other sdAb is a VHH.

[0166] In some embodiments, the first and second sdAbs are covalently bound via a chemical linkage.

[0167] In some embodiments, the first and second sdAbs are provided as single continuous polypeptide.

[0168] In some embodiments, the first and second sdAbs are provided as single continuous polypeptide optionally comprising an intervening polypeptide linker between the amino acid sequences of the first and second sdAbs.

[0169] In some embodiments the bivalent binding molecule optionally comprising a linker, is optionally expressed as a fusion protein with an additional amino acid sequence. In some embodiments, the additional amino acid sequence is a purification handle such as a chelating peptide or an additional protein such as a subunit of an Fc molecule.

[0170] The disclosure also provides an expression vector comprising a nucleic acid encoding the bispecific binding molecule operably linked to one or more expression control sequences. The disclosure also provides an isolated host cell comprising the expression vector expression vector comprising a nucleic acid encoding the bispecific binding molecule operably linked to one or more expression control sequences functional in the host cell.

[0171] In another aspect, the disclosure provides a pharmaceutical composition comprising the IL10Rα/IL2Rγ binding molecule described herein and a pharmaceutically acceptable carrier.

[0172] In another aspect, the disclosure provides a method of treating an autoimmune or inflammatory disease, disorder, or condition or a viral infection in a subject in need thereof, comprising administering to the subject a therapeutically effective amount of an IL10Rα/IL2Rγ binding molecule described herein or a pharmaceutical composition described herein.

[0173] In some embodiments, the binding proteins described herein are designed such that the binding proteins provide the maximal desired IL10 intracellular signaling from binding to IL10Rα and IL2Rγ on the desired cell types, while providing significantly less IL10 signaling in other undesired cell types. This can be achieved, for example, by selection of binding proteins having differing affinities or causing different Eₘₐₓ for IL10Rα and IL2Rγ as compared to the affinity of IL10 for IL10R. Because different cell types respond to the binding of ligands to its cognate receptor with different sensitivity, by modulating the affinity of the dimeric ligand (or its individual binding moieties) for the IL10 receptor relative to wild-type IL10 binding facilitates the stimulation of desired activities while reducing undesired activities on non-target cells. To measure downstream signaling activity, a number of methods are available. For example, in some embodiments, one can measure JAK/STAT signaling by the presence of phosphorylated receptors and/or phosphorylated STATs. In other embodiments, the expression of one or more downstream genes, whose expression levels can be effected by the level of downstream signaling caused by the binding protein, can also be measured.

### II. Definitions

[0174] As used herein, the term “antibody” refers collectively to: (a) glycosylated and non-glycosylated immunoglobulins (including but not limited to mammalian immunoglobulin classes IgG1, IgG2, IgG3 and IgG4) that specifically binds to target molecule and (b) immunoglobulin derivatives including but not limited to IgG(1-4)deltaC_{H}2, F(ab′)₂, Fab, ScFv, V_{H}, V_{L}, tetrabodies, triabodies, diabodies, dsFv, F(ab′)₃, scFv-Fc and (scFv)₂ that competes with the immunoglobulin from which it was derived for binding to the target molecule. The term antibody is not restricted to immunoglobulins derived from any particular mammalian species and includes murine, human, equine, and camelids antibodies (e.g., human antibodies).

[0175] The term antibody also includes so called “single-domain antibodies” or “sdAbs,” as well as “heavy chain antibodies” or “V_{H}Hs,” which are further defined herein. V_{H}Hs can be obtained from immunization of camelids (including camels, llamas, and alpacas (see, e.g., Hamers-Casterman, et al. (1993) Nature 363:446-448) or by screening libraries (e.g., phage libraries) constructed in V_{H}H frameworks. Antibodies having a given specificity may also be derived from non-mammalian sources such as V_{H}Hs obtained from immunization of cartilaginous fishes including, but not limited to, sharks. The term “antibody” encompasses antibodies isolatable from natural sources or from animals following immunization with an antigen and as well as engineered antibodies including monoclonal antibodies, bispecific antibodies, trispecific, chimeric antibodies, humanized antibodies, human antibodies, CDR-grafted, veneered, or deimmunized (e.g., to remove T-cell epitopes) antibodies. The term “human antibody” includes antibodies obtained from human beings as well as antibodies obtained from transgenic mammals comprising human immunoglobulin genes such that, upon stimulation with an antigen the transgenic animal produces antibodies comprising amino acid sequences characteristic of antibodies produced by human beings.

[0176] The term antibody includes both the parent antibody and its derivatives such as affinity matured, veneered, CDR grafted, humanized, camelized (in the case of V_{H}Hs), or binding molecules comprising binding domains of antibodies (e.g., CDRs) in non-immunoglobulin scaffolds.

[0177] The term “antibody” should not be construed as limited to any particular means of synthesis and includes naturally occurring antibodies isolatable from natural sources and as well as engineered antibodies molecules that are prepared by “recombinant” means including antibodies isolated from transgenic animals that are transgenic for human immunoglobulin genes or a hybridoma prepared therefrom, antibodies isolated from a host cell transformed with a nucleic acid construct that results in expression of an antibody, antibodies isolated from a combinatorial antibody library including phage display libraries. In one embodiment, an “antibody” is a mammalian immunoglobulin. In some embodiments, the antibody is a “full length antibody” comprising variable and constant domains providing binding and effector functions.

[0178] The term antibody includes antibody conjugates comprising modifications to prolong duration of action such as fusion proteins or conjugation to polymers (e.g., PEGylated).

[0179] As used herein, the term “binding protein” refers to a protein that can bind to one or more cell surface receptors or domains or subunits thereof. In some embodiments, a binding protein specifically binds to two different receptors (or domains or subunits thereof) such that the receptors (or domains or subunits) are maintained in proximity to each other such that the receptors (or domains or subunits), including domains thereof (e.g., intracellular domains) interact with each other and result in downstream signaling.

[0180] As used herein, the term “CDR” or “complementarity determining region” is intended to mean the non-contiguous antigen combining sites found within the variable region of both heavy and light chain immunoglobulin polypeptides. CDRs have been described by Kabat et al., J. Biol. Chem. 252:6609-6616 (1977); Kabat et al., U.S. Dept. of Health and Human Services, “Sequences of proteins of immunological interest” (1991) (also referred to herein as Kabat 1991); by Chothia et al., J. Mol. Biol. 196:901-917 (1987) (also referred to herein as Chothia 1987); and MacCallum et al., J. Mol. Biol. 262:732-745 (1996), where the definitions include overlapping or subsets of amino acid residues when compared against each other. Nevertheless, application of either definition to refer to a CDR of an antibody or grafted antibodies or variants thereof is intended to be within the scope of the term as defined and used herein. In the context of the present disclosure, the numbering of the CDR positions is provided according to Kabat numbering conventions. The term “Chothia Numbering” as used herein is recognized in the arts and refers to a system of numbering amino acid residues based on the location of the structural loop regions (Chothia et al. 1986, Science 233:755-758; Chothia & Lesk 1987, JMB 196:901-917; Chothia et al. 1992, JMB 227:799-817). For purposes of the present disclosure, unless otherwise specifically identified, the positioning of CDRs2 and 3 in the variable region of an antibody follows Kabat numbering or simply, “Kabat.” The positioning of CDR1 in the variable region of an antibody can follow Kabat numbering unless indicated as determined by a hybrid of Kabat and Chothia numbering schemes.

[0181] As used herein, the term “conservative amino acid substitution” refers to an amino acid replacement that changes a given amino acid to a different amino acid with similar biochemical properties (e.g., charge, hydrophobicity, and size). For example, the amino acids in each of the following groups can be considered as conservative amino acids of each other: (1) hydrophobic amino acids: alanine, isoleucine, leucine, tryptophan, phenylalanine, valine, proline, and glycine; (2) polar amino acids: glutamine, asparagine, histidine, serine, threonine, tyrosine, methionine, and cysteine; (3) basic amino acids: lysine and arginine; and (4) acidic amino acids: aspartic acid and glutamic acid.

[0182] As used herein, the term “downstream signaling” refers to the cellular signaling process that is caused by the interaction of two or more cell surface receptors that are brought into proximity of each other.

[0183] As used herein, the term “linker” refers to a linkage between two elements, e.g., protein domains. A linker can be a covalent bond or a peptide linker. The term “bond” refers to a chemical bond, e.g., an amide bond or a disulfide bond, or any kind of bond created from a chemical reaction, e.g., chemical conjugation. The term “peptide linker” refers to an amino acid or polypeptide that may be employed to link two protein domains to provide space and/or flexibility between the two protein domains.

[0184] As used herein, the term “multimerization” refers to two or more cell surface receptors, or domains or subunits thereof, being brought in close proximity to each other such that the receptors, or domains or subunits thereof, can interact with each other and cause downstream signaling.

[0185] As used herein, the terms “N-terminus” (or “amino terminus”) and “C-terminus” (or “carboxyl terminus”) refer to the extreme amino and carboxyl ends of the polypeptide, respectively, while the terms “N-terminal” and “C-terminal” refer to relative positions in the amino acid sequence of the polypeptide toward the N-terminus and the C-terminus, respectively, and can include the residues at the N-terminus and C-terminus, respectively. “Immediately N-terminal” or “immediately C-terminal” refers to a position of a first amino acid residue relative to a second amino acid residue where the first and second amino acid residues are covalently bound to provide a contiguous amino acid sequence.

[0186] As used herein, the term “neoplastic disease” refers to disorders or conditions in a subject arising from cellular hyper-proliferation or unregulated (or dysregulated) cell replication. The term neoplastic disease refers to disorders arising from the presence of neoplasms in the subject. Neoplasms may be classified as: (1) benign (2) pre-malignant (or “pre-cancerous”); and (3) malignant (or “cancerous”). The term “neoplastic disease” includes neoplastic-related diseases, disorders and conditions referring to conditions that are associated, directly or indirectly, with neoplastic disease, and includes, e.g., angiogenesis and precancerous conditions such as dysplasia.

[0187] As used herein, the terms “nucleic acid”, “nucleic acid molecule”, “polynucleotide” and the like are used interchangeably herein to refer to a polymeric form of nucleotides of any length, either deoxyribonucleotides or ribonucleotides, or analogs thereof. Non-limiting examples of polynucleotides include linear and circular nucleic acids, messenger RNA (mRNA), complementary DNA (cDNA), recombinant polynucleotides, vectors, probes, primers and the like.

[0188] As used herein, the term “percent (%) sequence identity” used in the context of nucleic acids or polypeptides, refers to a sequence that has at least 50% sequence identity with a reference sequence. Alternatively, percent sequence identity can be any integer from 50% to 100%. In some embodiments, a sequence has at least 50%, 55%, 60%, 65%, 70%, 75%, 80%, 85%, 90%, 91%, 92%, 93%, 94%, 95%, 96%, 97%, 98%, or 99% sequence identity to the reference sequence as determined with BLAST using standard parameters, as described below.

[0189] For sequence comparison, typically one sequence acts as a reference sequence, to which test sequences are compared. When using a sequence comparison algorithm, test and reference sequences are entered into a computer, subsequence coordinates are designated, if necessary, and sequence algorithm program parameters are designated. Default program parameters can be used, or alternative parameters can be designated. The sequence comparison algorithm then calculates the percent sequence identities for the test sequences relative to the reference sequence, based on the program parameters.

[0190] A comparison window includes reference to a segment of any one of the number of contiguous positions, e.g., a segment of at least 10 residues. In some embodiments, the comparison window has from 10 to 600 residues, e.g., about 10 to about 30 residues, about 10 to about 20 residues, about 50 to about 200 residues, or about 100 to about 150 residues, in which a sequence may be compared to a reference sequence of the same number of contiguous positions after the two sequences are optimally aligned.

[0191] Algorithms that are suitable for determining percent sequence identity and sequence similarity are the BLAST and BLAST 2.0 algorithms, which are described in Altschul et al. (1990) J Mol. Biol. 215: 403-410 and Altschul et al. (1977) Nucleic Acids Res. 25: 3389-3402, respectively. Software for performing BLAST analyses is publicly available through the National Center for Biotechnology Information (NCBI) web site. The algorithm involves first identifying high scoring sequence pairs (HSPs) by identifying short words of length W in the query sequence, which either match or satisfy some positive-valued threshold score T when aligned with a word of the same length in a database sequence. T is referred to as the neighborhood word score threshold (Altschul et al, supra). These initial neighborhood word hits act as seeds for initiating searches to find longer HSPs containing them. The word hits are then extended in both directions along each sequence for as far as the cumulative alignment score can be increased. Cumulative scores are calculated using, for nucleotide sequences, the parameters M (reward score for a pair of matching residues; always >0) and N (penalty score for mismatching residues; always <0). For amino acid sequences, a scoring matrix is used to calculate the cumulative score. Extension of the word hits in each direction are halted when: the cumulative alignment score falls off by the quantity X from its maximum achieved value; the cumulative score goes to zero or below, due to the accumulation of one or more negative-scoring residue alignments; or the end of either sequence is reached. The BLAST algorithm parameters W, T, and X determine the sensitivity and speed of the alignment. The BLASTN program (for nucleotide sequences) uses as defaults a word size (W) of 28, an expectation (E) of 10, M=1, N=−2, and a comparison of both strands. For amino acid sequences, the BLASTP program uses as defaults a word size (W) of 3, an expectation (E) of 10, and the BLOSUM62 scoring matrix (see Henikoff & Henikoff, Proc. Natl. Acad. Sci. USA 89:10915 (1989)).

[0192] The BLAST algorithm also performs a statistical analysis of the similarity between two sequences (see, e.g., Karlin & Altschul, Proc. Nat'l. Acad. Sci. USA 90:5873-5787 (1993)). One measure of similarity provided by the BLAST algorithm is the smallest sum probability (P(N)), which provides an indication of the probability by which a match between two nucleotide or amino acid sequences would occur by chance. For example, an amino acid sequence is considered similar to a reference sequence if the smallest sum probability in a comparison of the test amino acid sequence to the reference amino acid sequence is less than about 0.01, more preferably less than about 10⁻⁵, and most preferably less than about 10⁻².

[0193] As used herein the terms “polypeptide,” “peptide,” and “protein”, used interchangeably herein, refer to a polymeric form of amino acids of any length, which can include genetically coded and non-genetically coded amino acids, chemically or biochemically modified or derivatized amino acids, and polypeptides having modified polypeptide backbones. The terms include fusion proteins, including, but not limited to, fusion proteins with a heterologous amino acid sequence; fusion proteins with heterologous and homologous leader sequences; fusion proteins with or without N-terminus methionine residues; fusion proteins with immunologically tagged proteins; fusion proteins of immunologically active proteins (e.g., antigenic diphtheria or tetanus toxin fragments) and the like.

[0194] As used herein the terms “prevent”, “preventing”, “prevention” and the like refer to a course of action initiated with respect to a subject prior to the onset of a disease, disorder, condition or symptom thereof so as to prevent, suppress, inhibit or reduce, either temporarily or permanently, a subject's risk of developing a disease, disorder, condition or the like (as determined by, for example, the absence of clinical symptoms) or delaying the onset thereof, generally in the context of a subject predisposed due to genetic, experiential or environmental factors to having a particular disease, disorder or condition. In certain instances, the terms “prevent”, “preventing”, “prevention” are also used to refer to the slowing of the progression of a disease, disorder or condition from a present its state to a more deleterious state.

[0195] As used herein, the term “single-domain antibody” or “sdAb” refers to an antibody having a single monomeric variable antibody domain. A sdAb is able to bind selectively to a specific antigen. A V_{H}H antibody, further defined below, is an example of a sdAb.

[0196] As used herein, the term “specifically bind” refers to the degree of selectivity or affinity for which one molecule binds to another. In the context of binding pairs (e.g., a binding protein described herein/receptor, a ligand/receptor, antibody/antigen, antibody/ligand, antibody/receptor binding pairs), a first molecule of a binding pair is said to specifically bind to a second molecule of a binding pair when the first molecule of the binding pair does not bind in a significant amount to other components present in the sample. A first molecule of a binding pair is said to specifically bind to a second molecule of a binding pair when the affinity of the first molecule for the second molecule is at least two-fold greater, alternatively at least five times greater, alternatively at least ten times greater, alternatively at least 20-times greater, or alternatively at least 100-times greater than the affinity of the first molecule for other components present in the sample.

[0197] In a particular embodiment, a V_{H}H in a bispecific V_{H}H² binding protein described herein binds to a receptor (e.g., the first receptor or the second receptor of the natural or non-natural receptor pairs) if the equilibrium dissociation constant between the V_{H}H and the receptor is greater than about 10⁶ M, alternatively greater than about 10⁸ M, alternatively greater than about 10¹⁰ M, alternatively greater than about 10¹¹ M, alternatively greater than about 10¹⁰ M, greater than about 10¹² M as determined by, e.g., Scatchard analysis (Munsen, et al. 1980 Analyt. Biochem. 107:220-239). Specific binding may be assessed using techniques known in the art including but not limited to competition ELISA, BIACORE® assays and/or KINEXA® assays.

[0198] As used herein, the term “subject”, “recipient”, “individual”, or “patient”, refers to any mammalian subject for whom diagnosis, treatment, or therapy is desired, particularly humans. These terms can also be used interchangeably herein. “Mammal” for purposes of treatment refers to any animal classified as a mammal, including humans, domestic and farm animals, and zoo, sports, or pet animals, such as dogs, horses, cats, cows, sheep, goats, pigs, etc. In some embodiments, the mammal is a human being.

[0199] As used herein the term “T-cell” or “T cell” is used in its conventional sense to refer to a lymphocytes that differentiates in the thymus, possess specific cell-surface antigen receptors, and include some that control the initiation or suppression of cell-mediated and humoral immunity and others that lyse antigen-bearing cells. In some embodiments the T cell includes without limitation naïve CD8⁺ T cells, cytotoxic CD8⁺ T cells, naïve CD4⁺ T cells, helper T cells, e.g. T_{H}1, T_{H}2, T_{H}9, T_{H}11, T_{H}22, T_{FH}; regulatory T cells, e.g. TRI, Tregs, inducible Tregs; memory T cells, e.g. central memory T cells, effector memory T cells, NKT cells, tumor infiltrating lymphocytes (TILs) and engineered variants of such T-cells including but not limited to CAR-T cells, recombinantly modified TILs and TCR engineered cells.

[0200] As used herein, the term “therapeutically effective amount” as used herein in reference to the administration of an agent to a subject, either alone or as part of a pharmaceutical composition or treatment regimen, in a single dose or as part of a series of doses in an amount capable of having any detectable, positive effect on any symptom, aspect, or characteristic of a disease, disorder or condition when administered to the subject. The therapeutically effective amount can be ascertained by measuring relevant physiological effects, and it may be adjusted in connection with a dosing regimen and in response to diagnostic analysis of the subject's condition, and the like. The parameters for evaluation to determine a therapeutically effective amount of an agent are determined by the physician using art accepted diagnostic criteria including but not limited to indicia such as age, weight, sex, general health, ECOG score, observable physiological parameters, blood levels, blood pressure, electrocardiogram, computerized tomography, X-ray, and the like. Alternatively, or in addition, other parameters commonly assessed in the clinical setting may be monitored to determine if a therapeutically effective amount of an agent has been administered to the subject such as body temperature, heart rate, normalization of blood chemistry, normalization of blood pressure, normalization of cholesterol levels, or any symptom, aspect, or characteristic of the disease, disorder or condition, biomarkers (such as inflammatory cytokines, IFN-γ, granzyme, and the like), reduction in serum tumor markers, improvement in Response Evaluation Criteria In Solid Tumors (RECIST), improvement in Immune-Related Response Criteria (irRC), increase in duration of survival, extended duration of progression free survival, extension of the time to progression, increased time to treatment failure, extended duration of event free survival, extension of time to next treatment, improvement objective response rate, improvement in the duration of response, reduction of tumor burden, complete response, partial response, stable disease, and the like that that are relied upon by clinicians in the field for the assessment of an improvement in the condition of the subject in response to administration of an agent. As used herein the terms “Complete Response (CR),” “Partial Response (PR)” “Stable Disease (SD)” and “Progressive Disease (PD)” with respect to target lesions and the terms “Complete Response (CR),” “Incomplete Response/Stable Disease (SD)” and Progressive Disease (PD) with respect to non-target lesions are understood to be as defined in the RECIST criteria. As used herein the terms “immune-related Complete Response (irCR),” “immune-related Partial Response (irPR),” “immune-related Progressive Disease (irPD)” and “immune-related Stable Disease (irSD)” as defined in accordance with the Immune-Related Response Criteria (irRC). As used herein, the term “Immune-Related Response Criteria (irRC)” refers to a system for evaluation of response to immunotherapies as described in Wolchok, et al. (2009) Guidelines for the Evaluation of Immune Therapy Activity in Solid Tumors: Immune-Related Response Criteria, Clinical Cancer Research 15(23): 7412-7420. A therapeutically effective amount may be adjusted over a course of treatment of a subject in connection with the dosing regimen and/or evaluation of the subject's condition and variations in the foregoing factors. In one embodiment, a therapeutically effective amount is an amount of an agent when used alone or in combination with another agent does not result in non-reversible serious adverse events in the course of administration to a mammalian subject.

[0201] The terms “treat”, “treating”, treatment” and the like refer to a course of action (such as administering a binding protein described herein, or a pharmaceutical composition comprising same) initiated with respect to a subject after a disease, disorder or condition, or a symptom thereof, has been diagnosed, observed, or the like in the subject so as to eliminate, reduce, suppress, mitigate, or ameliorate, either temporarily or permanently, at least one of the underlying causes of such disease, disorder, or condition afflicting a subject, or at least one of the symptoms associated with such disease, disorder, or condition. The treatment includes a course of action taken with respect to a subject suffering from a disease where the course of action results in the inhibition (e.g., arrests the development of the disease, disorder or condition or ameliorates one or more symptoms associated therewith) of the disease in the subject.

[0202] As used herein, the term “V_{H}H” is a type of sdAb that has a single monomeric heavy chain variable antibody domain. Such antibodies can be found in or produced from Camelid mammals (e.g., camels, llamas) which are naturally devoid of light chains.

[0203] As used herein, the term “V_{H}H²” refers to two V_{H}Hs that are joined together by way of a linker (e.g., a covalent bond or a peptide linker). A “bispecific V_{H}H²” refers to a V_{H}H² that has a first V_{H}H binding to a first receptor, or domain or subunit thereof, and a second V_{H}H binding to a second receptor, or domain or subunit thereof.

### III. Compositions and Methods

[0204] The disclosure describes IL10Rα/IL2Rγ binding proteins that bind to IL10Rα and IL2Rγ or domains thereof. The various binding proteins can be screened for binding to IL10Rα and IL2Rγ or domains thereof and for signal transduction in therapeutically relevant cell types.

[0205] The binding proteins described herein can specifically bind to IL10Rα and IL2Rγ and can comprise an anti-IL10Rα V_{H}H antibody and an anti-IL2Rγ V_{H}H antibody. The binding proteins described herein are also referred to as anti-IL10Rα/IL2Rγ V_{H}H². The binding protein can cause the multimerization of IL10Rα and IL2Rγ and downstream signaling.

### Anti-IL10Rα V_{H}H Antibody

[0206] In some embodiments, the present disclosure provides polypeptides comprising any of the anti-IL10Rα V_{H}H antibodies described herein, e.g., a polypeptide comprising an anti-IL10Rα V_{H}H comprising a CDR1, a CDR2, and a CDR3 selected from Table 1 below. In certain embodiments, the present disclosure provides a polypeptide comprising a set of CDR1, CDR2, and CDR3 (e.g., CDR1, CDR2, and CDR3 described in the same row) selected from a row of Table 1 below. In certain embodiments, the present disclosure provides a polypeptide comprising a sequence having at least 90% (e.g., 90%, 91%, 92%, 93%, 94%, 95%, 96%, 97%, 98%, 99%, or 100%) identity to a sequence of an anti-IL10Rα V_{H}H antibody selected from Table 1 below. In some embodiments, a polypeptide provided by the present disclosure can comprise a dimer or multimer of two or more of anti-IL10Rα V_{H}H antibodies as described in Table 1, in which the anti-IL10Rα V_{H}H antibodies can be the same or different.

[0207] In some embodiments, the present disclosure provides an anti-IL10Rα V_{H}H antibody, which may be incorporated into a multivalent binding protein as described herein, comprising one or more of the CDR1s, CD2s, CDR3s or V_{H}H amino acid sequences as listed in Table 1 below. In some embodiments, the anti-IL10Rα V_{H}H antibody can comprise: (1) a CDR1 having a sequence of any one of SEQ ID NOS:1, 5, 9, 13, 17, 21, or 264-269 or a variant thereof that has a sequence having one, two, or three amino acid substitutions relative to a sequence of any one of SEQ ID NOS:1, 5, 9, 13, 17, 21, or 264-269; (2) a CDR2 having a sequence of any one of SEQ ID NOS:2, 6, 10, 14, 18, and 22 or a variant thereof that has a sequence having one, two, or three amino acid substitutions relative to a sequence of any one of SEQ ID NOS:2, 6, 10, 14, 18, and 22; (3) a CDR3 having a sequence of any one of SEQ ID NOS:3, 7, 11, 15, 19, and 23 or a variant thereof that has a sequence having one, two, or three amino acid substitutions relative to a sequence of any one of SEQ ID NOS:3, 7, 11, 15, 19, and 23. In some embodiments, an anti-IL10Rα V_{H}H antibody may be modified for extended half-life (e.g., Fc conjugation, PEGylation) either alone or in the context of a multivalent binding protein as described herein. In some embodiments the moiety providing half-life extension (e.g., PEG, Fc polypeptide, or Fc domain) is conjugated, optionally via a linker, to the N-terminus of the antibody, the C-terminus of the antibody, or an internal amino acid residue (particularly via conjugation to the side chains of lysine or cysteine residues). In some embodiments, the Fc polypeptide or an Fc domain is from an IgG1, IgG2, IgG3 or IgG4.

[0208] In some embodiments, the anti-IL10Rα V_{H}H antibody can comprise a set of CDR1, CDR2, and CDR3 (e.g., CDR1, CDR2, and CDR3 described in the same row) selected from a row of Table 1 below. In each set of CDR1, CDR2, and CDR3, (1) the CDR1 can have the indicated sequence in the set or a variant thereof that has a sequence having one, two, or three amino acid substitutions relative to the indicated sequence; (2) the CDR2 can have the indicated sequence in the set or a variant thereof that has a sequence having one, two, or three amino acid substitutions relative to the indicated sequence; (3) the CDR3 can have the indicated sequence in the set or a variant thereof that has a sequence having one, two, or three amino acid substitutions relative to the indicated sequence.

[0209] Further, an anti-IL10Rα V_{H}H antibody can comprise CDR1, CDR2, and CDR3 having the sequences of SEQ ID NOS:1-3. Further, an anti-IL10Rα V_{H}H antibody can comprise CDR1, CDR2, and CDR3 having the sequences of SEQ ID NOS:5-7. Further, an anti-IL10Rα V_{H}H antibody can comprise CDR1, CDR2, and CDR3 having the sequences of SEQ ID NOS:9-11. Further, an anti-IL10Rα V_{H}H antibody can comprise CDR1, CDR2, and CDR3 having the sequences of SEQ ID NOS:13-15. Further, an anti-IL10Rα V_{H}H antibody can comprise CDR1, CDR2, and CDR3 having the sequences of SEQ ID NOS:17-19. Further, an anti-IL10Rα V_{H}H antibody can comprise CDR1, CDR2, and CDR3 having the sequences of SEQ ID NOS:21-23.

[0210] Further, an anti-IL10Rα V_{H}H antibody can comprise CDR1, CDR2, and CDR3 having the sequences of SEQ ID NOS:1-3, respectively, and at least 90% (e.g., 90%, 91%, 92%, 93%, 94%, 95%, 96%, 97%, 98%, 99%, or 100%) identity to the sequence of SEQ ID NO:4. Further, an anti-IL10Rα V_{H}H antibody can comprise CDR1, CDR2, and CDR3 having the sequences of SEQ ID NOS:5-7, respectively, and at least 90% (e.g., 90%, 91%, 92%, 93%, 94%, 95%, 96%, 97%, 98%, 99%, or 100%) identity to the sequence of SEQ ID NO:8. Further, an anti-IL10Rα V_{H}H antibody can comprise CDR1, CDR2, and CDR3 having the sequences of SEQ ID NOS:9-11, respectively, and at least 90% (e.g., 90%, 91%, 92%, 93%, 94%, 95%, 96%, 97%, 98%, 99%, or 100%) identity to the sequence of SEQ ID NO:12. Further, an anti-IL10Rα V_{H}H antibody can comprise CDR1, CDR2, and CDR3 having the sequences of SEQ ID NOS:13-15, respectively, and at least 90% (e.g., 90%, 91%, 92%, 93%, 94%, 95%, 96%, 97%, 98%, 99%, or 100%) identity to the sequence of SEQ ID NO:16. Further, an anti-IL10Rα V_{H}H antibody can comprise CDR1, CDR2, and CDR3 having the sequences of SEQ ID NOS:17-19, respectively, and at least 90% (e.g., 90%, 91%, 92%, 93%, 94%, 95%, 96%, 97%, 98%, 99%, or 100%) identity to the sequence of SEQ ID NO:20. Further, an anti-IL10Rα V_{H}H antibody can comprise CDR1, CDR2, and CDR3 having the sequences of SEQ ID NOS:21-23, respectively, and at least 90% (e.g., 90%, 91%, 92%, 93%, 94%, 95%, 96%, 97%, 98%, 99%, or 100%) identity to the sequence of SEQ ID NO:24.

TABLE 1
Anti-IL10Rα V_{H}H antibody sequences

| | | CDR1 | | | |
|---|---|---|---|---|---|
| V_{H}H | CDR1 | (Chothia/ | | | |
| Ab | (Kabat) | Kabat) | CDR2 | CDR3 | V_{H}H |
| DR235 | IDYMA | YLYSIDY | VIYTAS | VRKTDS | QVQLQESGGGSVQAGGSLRLSCAASRYL |
| | (SEQ ID | MA (SEQ | GATFYP | YLFDAQ | YSIDYMAWFRQSPGKEREPVAVIYTASG |
| | NO: 1) | ID NO: | DSVKG | SFTY | ATFYPDSVKGRFTISQDNAKMTVYLQMN |
| | | 264) | (SEQ | (SEQ | SLKSEDTAMYYCAAVRKTDSYLFDAQSF |
| | | | ID NO: | ID NO: | TYWGQGTQVTVSS (SEQ ID NO: 4) |
| | | | 2) | 3) | |
| DR236 | SYCMG | FTYSSYC | SIDSDG | DLMSTV | QVQLQESGGGSVQAGGSLRLSCAASRFT |
| | (SEQ ID | MG (SEQ | STSYTD | VPGFCG | YSSYCMGWFRQAPGKEREGVASIDSDGS |
| | NO: 5) | ID NO: | SVKG | FLLSAG | TSYTDSVKGRFTISKDNAKNTLYLQMNS |
| | | 265) | (SEQ | MDY | LKPEDTAMYYCALDLMSTVVPGFCGFLL |
| | | | ID NO: | (SEQ | SAGMDYWGKGTQVTVSS (SEQ ID |
| | | | 6) | ID NO: | NO: 8) |
| | | | | 7) | |
| DR237 | MYCMG | YTYSMYC | QINSDG | DSRVYG | QVQLQESGGGSVQAGGSLRLSCAASGYT |
| | (SEQ ID | MG (SEQ | STSYAD | GSWYER | YSMYCMGWFRQAPGKEREGVAQINSDGS |
| | NO: 9) | ID NO: | SVKG | LCGPYT | TSYADSVKGRFTISKDNAKNTLYLQMNS |
| | | 266) | (SEQ | YEYNY | LKPEDTAMYYCAADSRVYGGSWYERLCG |
| | | | ID NO: | (SEQ | PYTYEYNYWGQGTQVTVSS (SEQ |
| | | | 10) | ID NO: | ID NO: 12) |
| | | | | 11) | |
| DR239 | SNCMG | YTYSSNC | TIYTGG | EPLSRV | QVQLQESGGGSVQAGGSLRLSCTVSGYT |
| | (SEQ ID | MG (SEQ | GNTYYA | YGGSCP | YSSNCMGWFRQAPGKEREGVATIYTGGG |
| | NO: 13) | ID NO: | DSVKG | TPTFDY | NTYYADSVKGRFTISQDNAKNTVYLQMN |
| | | 267) | (SEQ | (SEQ | NLKPEDTAMYYCAAEPLSRVYGGSCPTP |
| | | | ID NO: | ID NO: | TFDYWGQGTQVTVSS (SEQ ID NO: |
| | | | 14) | 15) | 16) |
| DR240 | SYCMG | YTYSSYC | VIDSDG | DLGHYR | QVQLQESGGGSVQAGGSLRLSCGASGYT |
| | (SEQ ID | MG (SEQ | STSYAD | PPCGVL | YSSYCMGWFRQVPGKEREGVAVIDSDGS |
| | NO: 17) | ID NO: | SVKG | YLGMDY | TSYADSVKGRFTISKDNGKNTLYLQMNS |
| | | 268) | (SEQ | (SEQ | LKPEDTAMYYCAADLGHYRPPCGVLYLG |
| | | | ID NO: | ID NO: | MDYWGKGTQVTVSS (SEQ ID NO: |
| | | | 18) | 19) | 20) |
| DR241 | SYDMT | YSNCSYD | AIHSDG | DPLHCR | QVQLQESGGGSVQAGGSLRLSCAASGYS |
| | (SEQ ID | MT (SEQ | STRYAD | AHGGSW | NCSYDMTWYRQAPGKEREFVSAIHSDGS |
| | NO: 21) | ID NO: | SVKG | YSVRAN | TRYADSVKGRFFISQDNAKNTVYLQMNS |
| | | 269) | (SEQ | Y (SEQ | LKPEDTAMYYCKTDPLHCRAHGGSWYSV |
| | | | ID NO: | ID NO: | RANYWGQGTQVTVSS (SEQ ID NO: |
| | | | 22) | 23) | 24) |

### Anti-IL2Rγ V_{H}H Antibody

[0211] In some embodiments, the present disclosure provides polypeptides comprising any of the anti-IL2Rγ V_{H}H antibodies described herein, e.g., a polypeptide comprising an anti-IL2Rγ V_{H}H comprising a CDR1, a CDR2, and a CDR3 selected from Table 2 below. In certain embodiments, the present disclosure provides a polypeptide comprising a set of CDR1, CDR2, and CDR3 (e.g., CDR1, CDR2, and CDR3 described in the same row) selected from a row of Table 2 below. In certain embodiments, the present disclosure provides a polypeptide comprising a sequence having at least 90% (e.g., 90%, 91%, 92%, 93%, 94%, 95%, 96%, 97%, 98%, 99%, or 100%) identity to a sequence of an anti-IL2Rγ V_{H}H antibody selected from Table 2 below. In some embodiments, a polypeptide provided by the present disclosure can comprise a dimer or multimer of two or more of anti-IL2Rγ V_{H}H antibodies as described in Table 2, in which the anti-IL2Rγ V_{H}H antibodies can be the same or different.

[0212] In some embodiments, the present disclosure provides an anti-IL10Rα V_{H}H antibody, which may be incorporated into a multivalent binding protein as described herein, comprising one or more of the CDR1s, CD2s, CDR3s or V_{H}H amino acid sequences as listed in Table 1 below. In some embodiments, the present disclosure provides an anti-IL2Rγ V_{H}H antibody, which may be incorporated into a multivalent binding protein as described herein, comprising one or more of CDR1s, CD2s, CDR3s or V_{H}H amino acid sequences as listed in Table 2 below. In some embodiments, the anti-IL2Rγ V_{H}H antibody can comprise: (1) a CDR1 having a sequence of any one of SEQ ID NOS:25, 29, 33, 37, 41, 45 or 270-275 or a variant thereof that has a sequence having one, two, or three amino acid substitutions relative to a sequence of any one of SEQ ID NOS:25, 29, 33, 37, 41, 45 or 270-275; (2) a CDR2 having a sequence of any one of SEQ ID NOS:26, 30, 34, 38, 42, and 46 or a variant thereof that has a sequence having one, two, or three amino acid substitutions relative to a sequence of any one of SEQ ID NOS:26, 30, 34, 38, 42, and 46; (3) a CDR3 having a sequence of any one of SEQ ID NOS:27, 31, 35, 39, 43, and 47 or a variant thereof that has a sequence having one, two, or three amino acid substitutions relative to a sequence of any one of SEQ ID NOS:27, 31, 35, 39, 43, and 47. In some embodiments, an anti-IL2Rγ V_{H}H may be modified for extended half life (e.g., Fc conjugation, PEGylation) either alone or in the context of a multivalent binding protein as described herein. In some embodiments the moiety providing half-life extension (e.g., PEG, Fc polypeptide, or Fc domain) is conjugated, optionally via a linker, to the N-terminus of the antibody, the C-terminus of the antibody, or an internal amino acid residue (particularly via conjugation to the side chains of lysine or cysteine residues). In some embodiments, the Fc polypeptide or an Fc domain is from an IgG1, IgG2, IgG3 or IgG4.

[0213] In some embodiments, the anti-IL2Rγ V_{H}H antibody can comprise a set of CDR1, CDR2, and CDR3 (e.g., CDR1, CDR2, and CDR3 described in the same row) selected from a row of Table 2 below. In each set of CDR1, CDR2, and CDR3, (1) the CDR1 can have the indicated sequence in the set or a variant thereof that has a sequence having one, two, or three amino acid substitutions relative to the indicated sequence; (2) the CDR2 can have the indicated sequence in the set or a variant thereof that has a sequence having one, two, or three amino acid substitutions relative to the indicated sequence; (3) the CDR3 can have the indicated sequence in the set or a variant thereof that has a sequence having one, two, or three amino acid substitutions relative to the indicated sequence.

[0214] Further, an anti-IL2Rγ V_{H}H antibody can comprise CDR1, CDR2, and CDR3 having the sequences of SEQ ID NOS:25-27. Further, an anti-IL2Rγ V_{H}H antibody can comprise CDR1, CDR2, and CDR3 having the sequences of SEQ ID NOS:29-31. Further, an anti-IL2Rγ V_{H}H antibody can comprise CDR1, CDR2, and CDR3 having the sequences of SEQ ID NOS:33-35. Further, an anti-IL2Rγ V_{H}H antibody can comprise CDR1, CDR2, and CDR3 having the sequences of SEQ ID NOS:37-39. Further, an anti-IL2Rγ V_{H}H antibody can comprise CDR1, CDR2, and CDR3 having the sequences of SEQ ID NOS:41-43. Further, an anti-IL2Rγ V_{H}H antibody can comprise CDR1, CDR2, and CDR3 having the sequences of SEQ ID NOS:45-47.

[0215] Further, an anti-IL2Rγ V_{H}H antibody can comprise CDR1, CDR2, and CDR3 having the sequences of SEQ ID NOS:25-27, respectively, and at least 90% (e.g., 90%, 91%, 92%, 93%, 94%, 95%, 96%, 97%, 98%, 99%, or 100%) identity to the sequence of SEQ ID NO:28. Further, an anti-IL2Rγ V_{H}H antibody can comprise CDR1, CDR2, and CDR3 having the sequences of SEQ ID NOS:29-31, respectively, and at least 90% (e.g., 90%, 91%, 92%, 93%, 94%, 95%, 96%, 97%, 98%, 99%, or 100%) identity to the sequence of SEQ ID NO:32. Further, an anti-IL2Rγ V_{H}H antibody can comprise CDR1, CDR2, and CDR3 having the sequences of SEQ ID NOS:33-35, respectively, and at least 90% (e.g., 90%, 91%, 92%, 93%, 94%, 95%, 96%, 97%, 98%, 99%, or 100%) identity to the sequence of SEQ ID NO:36. Further, an anti-IL2Rγ V_{H}H antibody can comprise CDR1, CDR2, and CDR3 having the sequences of SEQ ID NOS:37-39, respectively, and at least 90% (e.g., 90%, 91%, 92%, 93%, 94%, 95%, 96%, 97%, 98%, 99%, or 100%) identity to the sequence of SEQ ID NO:40. Further, an anti-IL2Rγ V_{H}H antibody can comprise CDR1, CDR2, and CDR3 having the sequences of SEQ ID NOS:41-43, respectively, and at least 90% (e.g., 90%, 91%, 92%, 93%, 94%, 95%, 96%, 97%, 98%, 99%, or 100%) identity to the sequence of SEQ ID NO:44. Further, an anti-IL2Rγ V_{H}H antibody can comprise CDR1, CDR2, and CDR3 having the sequences of SEQ ID NOS:45-47, respectively, and at least 90% (e.g., 90%, 91%, 92%, 93%, 94%, 95%, 96%, 97%, 98%, 99%, or 100%) identity to the sequence of SEQ ID NO:48.

TABLE 2
Anti-IL2Rγ V_{H}H antibody sequences

| | | CDR1 | | | |
|---|---|---|---|---|---|
| V_{H}H | CDR1 | (Chothia/ | | | |
| Ab. | (Kabat) | Kabat) | CDR2 | CDR3 | V_{H}H |
| DR229 | SYPMT | FSFSSYP | TIASDG | GYGDGT | QVQLQESGGGLVQPGGSLRLSCTASGF |
| | (SEQ ID | MT (SEQ | GSTAYA | PA | SFSSYPMTWARQAPGKGLEWVSTIASD |
| | NO: 25) | ID NO: | ASVEG | (SEQ | GGSTAYAASVEGRFTISRDNAKSTLYL |
| | | 270) | (SEQ | ID NO: | QLNSLKTEDTAMYYCTKGYGDGTPAPG |
| | | | ID NO: | 27) | QGTQVTVSS (SEQ ID NO: 28) |
| | | | 26) | | |
| DR230 | SAHMS | FTFSSAH | SIYSGG | NRLHYY | QVQLQESGGGLVQPGGSLRLSCAASGF |
| | (SEQ ID | MS (SEQ | GTFYAD | SDDDSL | TFSSAHMSWVRQAPGKGREWIASIYSG |
| | NO: 29) | ID NO: | SVKG | (SEQ | GGTFYADSVKGRFTISRDNAKNTLYLQ |
| | | 271) | (SEQ | ID NO: | LNSLKAEDTAMYYCATNRLHYYSDDD |
| | | | ID NO: | 31) | SLRGQGTQVTVSS (SEQ ID NO: |
| | | | 30) | | 32) |
| DR231 | DREMN | FTFDDRE | TISSDG | DFMIAI | QVQLQESGGGSVQAGGSLRLSCTASGF |
| | (SEQ ID | MN (SEQ | STYYAD | QAPGAG | TFDDREMNWYRQAPGNECELVSTISSD |
| | NO: 33) | ID NO: | SVKG | C (SEQ | GSTYYADSVKGRFTISQDNAKNTVYLQ |
| | | 272) | (SEQ | ID NO: | MDSVKPEDTAVYYCAADFMIAIQAPGA |
| | | | ID NO: | 35) | GCWGQGTQVTVSS (SEQ ID NO: |
| | | | 34) | | 36) |
| DR232 | CMG | YTSCMG | TIYTRG | GGYSWS | QVQLQESGGGSVQAGGSLRLSCVASGY |
| | (SEQ ID | (SEQ ID | RSIYYA | AGCEFN | TSCMGWFRQAPGKEREAVATIYTRGRS |
| | NO: 37) | NO: 273) | DSVKG | Y (SEQ | IYYADSVKGRFTISQDNAKNTLYLQMN |
| | | | (SEQ | ID NO: | SLKPEDIAMYSCAAGGYSWSAGCEFNY |
| | | | ID NO: | 39) | WGQGTQVTVSS (SEQ ID NO: 40) |
| | | | 38) | | |
| DR233 | DSDMG | FTFDDSD | TISSDG | EPRGYY | QVQLQESGGGSVQAGGSLRLSCTASGF |
| | (SEQ ID | MG (SEQ | STYYAD | SNYGGR | TFDDSDMGWYRQAPGNECELVSTISSD |
| | NO: 41) | ID NO: | SVKG | RECNY | GSTYYADSVKGRFTISQDNAKNTVYLQ |
| | | 274) | (SEQ | (SEQ | MNSLKPEDTAVYYCAAEPRGYYSNYGG |
| | | | ID NO: | ID NO: | RRECNYWGQGTQVTVSS (SEQ ID |
| | | | 42) | 43) | NO: 44) |
| DR234 | SYCMG | YTFSSYC | ALGGGS | AWVACL | QVQLQESGGGSVQAGGSLRLSCVASGY |
| | (SEQ ID | MG (SEQ | TYYADS | EFGGSW | TFSSYCMGWFRQAPGKEREGVAALGGG |
| | NO: 45) | ID NO: | VKG | YDLARY | STYYADSVKGRFTISQDNAKNTLYLQM |
| | | 275) | (SEQ | KH | NSLKPEDTAMYYCAAAWVACLEFGGSW |
| | | | ID NO: | (SEQ | YDLARYKHWGQGTQVTVSS (SEQ |
| | | | 46) | ID NO: | ID NO: 48) |
| | | | | 47) | |

Anti-IL10Rα/IL2Rγ V_{H}H²

[0216] An IL10Rα/IL2Rγ binding protein described herein can comprise an anti-IL10Rα V_{H}H antibody selected from Table 1 and an anti-IL2Rγ V_{H}H antibody selected from Table 2. In some embodiments, the N-terminal V_{H}H of the IL2R binding molecule is an anti-IL10Rα V_{H}H antibody and the C-terminal V_{H}H of the IL10Rα/IL2Rγ binding protein is an anti-IL2Rγ V_{H}H antibody, optionally a linker can be used between the two V_{H}H antibodies. In some embodiments, the N-terminal V_{H}H of the IL10Rα/IL2Rγ binding protein is an anti-IL2Rγ V_{H}H antibody and the C-terminal V_{H}H of the IL10Rα/IL2Rγ binding protein is an anti-IL10Rα V_{H}H antibody, optionally a linker can be used between the two V_{H}H antibodies. Examples of linkers (e.g., GGGS (SEQ ID NO:62)) that can be used to fuse the anti-IL10Rα V_{H}H antibody and the anti-IL2Rγ V_{H}H antibody are described in detail further herein. In some embodiments, the IL10Rα/IL2Rγ binding protein may be operably linked to a metal chelating peptide. Chelating peptides include but are not limited to the Ala-Ser-His-His-His-His-His-His (“ASH6”, SEQ ID NO:81) or the His-His-His-His-His-His (“H6”, SEQ ID NO:82) purification handle to facilitate purification of the binding protein by chelating peptide immobilized metal affinity chromatography (“CP-IMAC, as described in U.S. Pat. No. 4,569,794).

[0217] Table 3 below further illustrates examples of IL10Rα/IL2Rγ binding proteins described herein that comprise an anti-IL10Rα V_{H}H antibody at the N-terminus and an anti-IL2Rγ V_{H}H antibody at the C-terminus.

[0218] In some embodiments, an IL10Rα/IL2Rγ binding protein comprises the V_{H}H sequence of DR235, the V_{H}H sequence of DR233, and has at least 90% (e.g., 90%, 91%, 92%, 93%, 94%, 95%, 96%, 97%, 98%, 99%, or 100%) identity to the sequence of SEQ ID NO:49, optionally without the terminal HHHHHH. In some embodiments, an IL10Rα/IL2Rγ binding protein comprises the V_{H}H sequence of DR235, the V_{H}H sequence of DR234, and has at least 90% (e.g., 90%, 91%, 92%, 93%, 94%, 95%, 96%, 97%, 98%, 99%, or 100%) identity to the sequence of SEQ ID NO:50, optionally without the terminal HHHHHH. In some embodiments, an IL10Rα/IL2Rγ binding protein comprises the V_{H}H sequence of DR236, the V_{H}H sequence of DR231, and has at least 90% (e.g., 90%, 91%, 92%, 93%, 94%, 95%, 96%, 97%, 98%, 99%, or 100%) identity to the sequence of SEQ ID NO:51, optionally without the terminal HHHHHH. In some embodiments, an IL10Rα/IL2Rγ binding protein comprises the V_{H}H sequence of DR236, the V_{H}H sequence of DR232, and has at least 90% (e.g., 90%, 91%, 92%, 93%, 94%, 95%, 96%, 97%, 98%, 99%, or 100%) identity to the sequence of SEQ ID NO:52, optionally without the terminal HHHHHH. In some embodiments, an IL10Rα/IL2Rγ binding protein comprises the V_{H}H sequence of DR236, the V_{H}H sequence of DR234, and has at least 90% (e.g., 90%, 91%, 92%, 93%, 94%, 95%, 96%, 97%, 98%, 99%, or 100%) identity to the sequence of SEQ ID NO:53, optionally without the terminal HHHHHH. In some embodiments, an IL10Rα/IL2Rγ binding protein comprises the V_{H}H sequence of DR237, the V_{H}H sequence of DR233, and has at least 90% (e.g., 90%, 91%, 92%, 93%, 94%, 95%, 96%, 97%, 98%, 99%, or 100%) identity to the sequence of SEQ ID NO:54, optionally without the terminal HHHHHH. In some embodiments, an IL10Rα/IL2Rγ binding protein comprises the V_{H}H sequence of DR240, the V_{H}H sequence of DR231, and has at least 90% (e.g., 90%, 91%, 92%, 93%, 94%, 95%, 96%, 97%, 98%, 99%, or 100%) identity to the sequence of SEQ ID NO:55, optionally without the terminal HHHHHH. In some embodiments, an IL10Rα/IL2Rγ binding protein comprises the V_{H}H sequence of DR240, the V_{H}H sequence of DR232, and has at least 90% (e.g., 90%, 91%, 92%, 93%, 94%, 95%, 96%, 97%, 98%, 99%, or 100%) identity to the sequence of SEQ ID NO:56, optionally without the terminal HHHHHH. In some embodiments, an IL10Rα/IL2Rγ binding protein comprises the V_{H}H sequence of DR240, the V_{H}H sequence of DR234, and has at least 90% (e.g., 90%, 91%, 92%, 93%, 94%, 95%, 96%, 97%, 98%, 99%, or 100%) identity to the sequence of SEQ ID NO:57, optionally without the terminal HHHHHH. In some embodiments, an IL10Rα/IL2Rγ binding protein comprises the V_{H}H sequence of DR241, the V_{H}H sequence of DR231, and has at least 90% (e.g., 90%, 91%, 92%, 93%, 94%, 95%, 96%, 97%, 98%, 99%, or 100%) identity to the sequence of SEQ ID NO:58, optionally without the terminal HHHHHH. In some embodiments, an IL10Rα/IL2Rγ binding protein comprises the V_{H}H sequence of DR241, the V_{H}H sequence of DR234, and has at least 90% (e.g., 90%, 91%, 92%, 93%, 94%, 95%, 96%, 97%, 98%, 99%, or 100%) identity to the sequence of SEQ ID NO:59, optionally without the terminal HHHHHH.

TABLE 3
Anti-IL10Rα/IL2Rγ V_{H}H² (anti-IL10Rα
V_{H}H-linker-anti-IL2Rγ V_{H}H)

| Anti- | | | |
|---|---|---|---|
| IL10Rα/ | N- | C- | |
| IL2Rγ | terminal | terminal | |
| V_{H}H² | V_{H}H | V_{H}H | Anti-IL10Rα/IL2Rγ V_{H}H² |
| DR437 | DR235 | DR233 | QVQLQESGGGSVQAGGSLRLSCAASRYLYSIDYMAW |
| | | | FRQSPGKEREPVAVIYTASGATFYPDSVKGRFTISQ |
| | | | DNAKMTVYLQMNSLKSEDTAMYYCAAVRKTDSYLFD |
| | | | AQSFTYWGQGTQVTVSSGGGSQVQLQESGGGSVQAG |
| | | | GSLRLSCTASGFTFDDSDMGWYRQAPGNECELVSTI |
| | | | SSDGSTYYADSVKGRFTISQDNAKNTVYLQMNSLKP |
| | | | EDTAVYYCAAEPRGYYSNYGGRRECNYWGQGTQVTV |
| | | | SSASHHHHHH (SEQ ID NO: 49) |
| DR438 | DR235 | DR234 | QVQLQESGGGSVQAGGSLRLSCAASRYLYSIDYMAW |
| | | | FRQSPGKEREPVAVIYTASGATFYPDSVKGRFTISQ |
| | | | DNAKMTVYLQMNSLKSEDTAMYYCAAVRKTDSYLFD |
| | | | AQSFTYWGQGTQVTVSSGGGSQVQLQESGGGSVQAG |
| | | | GSLRLSCVASGYTFSSYCMGWFRQAPGKEREGVAAL |
| | | | GGGSTYYADSVKGRFTISQDNAKNTLYLQMNSLKPE |
| | | | DTAMYYCAAAWVACLEFGGSWYDLARYKHWGQGTQV |
| | | | TVSSASHHHHHH (SEQ ID NO: 50) |
| DR441 | DR236 | DR231 | QVQLQESGGGSVQAGGSLRLSCAASRFTYSSYCMGW |
| | | | FRQAPGKEREGVASIDSDGSTSYTDSVKGRFTISKD |
| | | | NAKNTLYLQMNSLKPEDTAMYYCALDLMSTVVPGFC |
| | | | GFLLSAGMDYWGKGTQVTVSSGGGSQVQLQESGGGS |
| | | | VQAGGSLRLSCTASGFTFDDREMNWYRQAPGNECEL |
| | | | VSTISSDGSTYYADSVKGRFTISQDNAKNTVYLQMD |
| | | | SVKPEDTAVYYCAADFMIAIQAPGAGCWGQGTQVTV |
| | | | SSASHHHHHH (SEQ ID NO: 51) |
| DR442 | DR236 | DR232 | QVQLQESGGGSVQAGGSLRLSCAASRFTYSSYCMGW |
| | | | FRQAPGKEREGVASIDSDGSTSYTDSVKGRFTISKD |
| | | | NAKNTLYLQMNSLKPEDTAMYYCALDLMSTVVPGFC |
| | | | GFLLSAGMDYWGKGTQVTVSSGGGSQVQLQESGGGS |
| | | | VQAGGSLRLSCVASGYTSCMGWFRQAPGKEREAVAT |
| | | | IYTRGRSIYYADSVKGRFTISQDNAKNTLYLQMNSL |
| | | | KPEDIAMYSCAAGGYSWSAGCEFNYWGQGTQVTVSS |
| | | | ASHHHHHH (SEQ ID NO: 52) |
| DR444 | DR236 | DR234 | QVQLQESGGGSVQAGGSLRLSCAASRFTYSSYCMGW |
| | | | FRQAPGKEREGVASIDSDGSTSYTDSVKGRFTISKD |
| | | | NAKNTLYLQMNSLKPEDTAMYYCALDLMSTVVPGFC |
| | | | GFLLSAGMDYWGKGTQVTVSSGGGSQVQLQESGGGS |
| | | | VQAGGSLRLSCVASGYTFSSYCMGWFRQAPGKEREG |
| | | | VAALGGGSTYYADSVKGRFTISQDNAKNTLYLQMNS |
| | | | LKPEDTAMYYCAAAWVACLEFGGSWYDLARYKHWGQ |
| | | | GTQVTVSSASHHHHHH (SEQ ID NO: 53) |
| DR449 | DR237 | DR233 | QVQLQESGGGSVQAGGSLRLSCAASGYTYSMYCMGW |
| | | | FRQAPGKEREGVAQINSDGSTSYADSVKGRFTISKD |
| | | | NAKNTLYLQMNSLKPEDTAMYYCAADSRVYGGSWYE |
| | | | RLCGPYTYEYNYWGQGTQVTVSSGGGSQVQLQESGG |
| | | | GSVQAGGSLRLSCTASGFTFDDSDMGWYRQAPGNEC |
| | | | ELVSTISSDGSTYYADSVKGRFTISQDNAKNTVYLQ |
| | | | MNSLKPEDTAVYYCAAEPRGYYSNYGGRRECNYWGQ |
| | | | GTQVTVSSASHHHHHH (SEQ ID NO: 54) |
| DR465 | DR240 | DR231 | QVQLQESGGGSVQAGGSLRLSCGASGYTYSSYCMGW |
| | | | FRQVPGKEREGVAVIDSDGSTSYADSVKGRFTISKD |
| | | | NGKNTLYLQMNSLKPEDTAMYYCAADLGHYRPPCGV |
| | | | LYLGMDYWGKGTQVTVSSGGGSQVQLQESGGGSVQA |
| | | | GGSLRLSCTASGFTFDDREMNWYRQAPGNECELVST |
| | | | ISSDGSTYYADSVKGRFTISQDNAKNTVYLQMDSVK |
| | | | PEDTAVYYCAADFMIAIQAPGAGCWGQGTQVTVSSA |
| | | | SHHHHHH (SEQ ID NO: 55) |
| DR466 | DR240 | DR232 | QVQLQESGGGSVQAGGSLRLSCGASGYTYSSYCMGW |
| | | | FRQVPGKEREGVAVIDSDGSTSYADSVKGRFTISKD |
| | | | NGKNTLYLQMNSLKPEDTAMYYCAADLGHYRPPCGV |
| | | | LYLGMDYWGKGTQVTVSSGGGSQVQLQESGGGSVQA |
| | | | GGSLRLSCVASGYTSCMGWFRQAPGKEREAVATIYT |
| | | | RGRSIYYADSVKGRFTISQDNAKNTLYLQMNSLKPE |
| | | | DIAMYSCAAGGYSWSAGCEFNYWGQGTQVTVSSASH |
| | | | HHHHH (SEQ ID NO: 56) |
| DR468 | DR240 | DR234 | QVQLQESGGGSVQAGGSLRLSCGASGYTYSSYCMGW |
| | | | FRQVPGKEREGVAVIDSDGSTSYADSVKGRFTISKD |
| | | | NGKNTLYLQMNSLKPEDTAMYYCAADLGHYRPPCGV |
| | | | LYLGMDYWGKGTQVTVSSGGGSQVQLQESGGGSVQA |
| | | | GGSLRLSCVASGYTFSSYCMGWFRQAPGKEREGVAA |
| | | | LGGGSTYYADSVKGRFTISQDNAKNTLYLQMNSLKP |
| | | | EDTAMYYCAAAWVACLEFGGSWYDLARYKHWGQGTQ |
| | | | VTVSSASHHHHHH (SEQ ID NO: 57) |
| DR471 | DR241 | DR231 | QVQLQESGGGSVQAGGSLRLSCAASGYSNCSYDMTW |
| | | | YRQAPGKEREFVSAIHSDGSTRYADSVKGRFFISQD |
| | | | NAKNTVYLQMNSLKPEDTAMYYCKTDPLHCRAHGGS |
| | | | WYSVRANYWGQGTQVTVSSGGGSQVQLQESGGGSVQ |
| | | | AGGSLRLSCTASGFTFDDREMNWYRQAPGNECELVS |
| | | | TISSDGSTYYADSVKGRFTISQDNAKNTVYLQMDSV |
| | | | KPEDTAVYYCAADFMIAIQAPGAGCWGQGTQVTVSS |
| | | | ASHHHHHH (SEQ ID NO: 58) |
| DR474 | DR241 | DR234 | QVQLQESGGGSVQAGGSLRLSCAASGYSNCSYDMTW |
| | | | YRQAPGKEREFVSAIHSDGSTRYADSVKGRFFISQD |
| | | | NAKNTVYLQMNSLKPEDTAMYYCKTDPLHCRAHGGS |
| | | | WYSVRANYWGQGTQVTVSSGGGSQVQLQESGGGSVQ |
| | | | AGGSLRLSCVASGYTFSSYCMGWFRQAPGKEREGVA |
| | | | ALGGGSTYYADSVKGRFTISQDNAKNTLYLQMNSLK |
| | | | PEDTAMYYCAAAWVACLEFGGSWYDLARYKHWGQGT |
| | | | QVTVSSASHHHHHH (SEQ ID NO: 59) |

[0219] Table 4 below provides illustrative examples of IL10Rα/IL2Rγ binding proteins described herein that comprise an anti-IL2Rγ V_{H}H antibody at the N-terminus and an anti-IL10Rα V_{H}H antibody at the C-terminus.

[0220] In some embodiments, an IL10Rα/IL2Rγ binding protein comprises the V_{H}H sequence of DR229, the V_{H}H sequence of DR236, and at least at least 90% (e.g., 90%, 91%, 92%, 93%, 94%, 95%, 96%, 97%, 98%, 99%, or 100%) identity to the sequence of SEQ ID NO:60, optionally without the terminal HHHHHH. In some embodiments, an IL10Rα/IL2Rγ binding protein comprises the V_{H}H sequence of DR229, the V_{H}H sequence of DR239, and at least at least 90% (e.g., 90%, 91%, 92%, 93%, 94%, 95%, 96%, 97%, 98%, 99%, or 100%) identity to the sequence of SEQ ID NO:61, optionally without the terminal HHHHHH.

TABLE 4
Anti-IL10Rα/IL2Rγ V_{H}H² (anti-IL2Rγ
VHH-linker-anti-IL10Rα V_{H}H)

| Anti- | | | |
|---|---|---|---|
| IL 10Rα/ | N- | C- | |
| IL2Rγ | terminal | terminal | |
| V_{H}H² | V_{H}H | V_{H}H | Anti-IL10Rα/IL2Rγ V_{H}H² |
| DR392 | DR229 | DR236 | QVQLQESGGGLVQPGGSLRLSCTASGFSFSSYPMTWA |
| | | | RQAPGKGLEWVSTIASDGGSTAYAASVEGRFTISRDN |
| | | | AKSTLYLQLNSLKTEDTAMYYCTKGYGDGTPAPGQGT |
| | | | QVTVSSGGGSQVQLQESGGGSVQAGGSLRLSCAASRF |
| | | | TYSSYCMGWFRQAPGKEREGVASIDSDGSTSYTDSVK |
| | | | GRFTISKDNAKNTLYLQMNSLKPEDTAMYYCALDLMS |
| | | | TVVPGFCGFLLSAGMDYWGKGTQVTVSSASHHHHHH |
| | | | (SEQ ID NO: 60) |
| DR395 | DR229 | DR239 | QVQLQESGGGLVQPGGSLRLSCTASGFSFSSYPMTWA |
| | | | RQAPGKGLEWVSTIASDGGSTAYAASVEGRFTISRDN |
| | | | AKSTLYLQLNSLKTEDTAMYYCTKGYGDGTPAPGQGT |
| | | | QVTVSSGGGSQVQLQESGGGSVQAGGSLRLSCTVSGY |
| | | | TYSSNCMGWFRQAPGKEREGVATIYTGGGNTYYADSV |
| | | | KGRFTISQDNAKNTVYLQMNNLKPEDTAMYYCAAEPL |
| | | | SRVYGGSCPTPTFDYWGQGTQVTVSSASHHHHHH |
| | | | (SEQ ID NO: 61) |

[0221] As shown in the illustrative examples of IL10Rα/IL2Rγ binding proteins of Table 3 and Table 4, the IL10Rα/IL2Rγ binding protein sequences contain GGGS (SEQ ID NO:62) as a linker. In some embodiments, the GGGS (SEQ ID NO:62) can be replaced by other linkers as described further herein. Furthermore, the IL10Rα/IL2Rγ binding protein sequences shown in Table 3 and Table 4 may be operably linked to a chelating peptide such as the “ASH6” (SEQ ID NO:81) metal chelating peptide which may be used to facilitate purification via metal affinity chromatography. In some embodiments, this purification handle can be removed or replaced by other purification handles (e.g., H6 (SEQ ID NO:82)).

[0222] Further, in each of SEQ ID NOS:96-179 below, each title of the sequence follows the formula “anti-IL10Rα/IL2Rγ V_{H}H² (V_{H}H antibody at the N-terminus-V_{H}H antibody at the C-terminus).” For example, “DR391(DR229-DR235)” refers to the anti-IL10Rα/IL2Rγ V_{H}H² binding protein with DR229 V_{H}H at the N-terminus and DR235 V_{H}H antibody at the C-terminus. In each of SEQ ID NOS:96-179 below, the linker is in bold, and each of CDR1, CDR2, CDR3 of the N-terminal V_{H}H antibody and CDR1, CDR2, CDR3 of the C-terminal V_{H}H antibody is underlined, respectively. An IL10Rα/IL2Rγ binding protein described herein can comprise the V_{H}H sequence of the N-terminal V_{H}H antibody, the V_{H}H sequence of the C-terminal V_{H}H antibody, and at least at least 90% (e.g., 90%, 91%, 92%, 93%, 94%, 95%, 96%, 97%, 98%, 99%, or 100%) identity to a sequence of any one of SEQ ID NOS:96-179. Moreover, the GGGS (SEQ ID NO:62) in each of SEQ ID NOS:96-179 below can be replaced by other linkers as described further herein. The purification handle “ASH6” (SEQ ID NO:81) at the end of each of SEQ ID NOS:96-179 can be removed or replaced by other purification handles (e.g., H6 (SEQ ID NO: 82)).

DR391(DR229-DR235)
>SEQ ID NO: 96
QVQLQESGGGLVQPGGSLRLSCTASGFSFSSYPMTWARQAPGKGLEWVST
IASDGGSTAYAASVEGRFTISRDNAKSTLYLQLNSLKTEDTAMYYCTKGY
GDGTPAPGQGTQVTVSSGGGSQVQLQESGGGSVQAGGSLRLSCAASRYLY
SIDYMAWFRQSPGKEREPVAVIYTASGATFYPDSVKGRFTISQDNAKMTV
YLQMNSLKSEDTAMYYCAAVRKTDSYLFDAQSFTYWGQGTQVTVSSASHH
HHHH;
DR392(DR229-DR236)
>SEQ ID NO: 97
QVQLQESGGGLVQPGGSLRLSCTASGFSFSSYPMTWARQAPGKGLEWVST
IASDGGSTAYAASVEGRFTISRDNAKSTLYLQLNSLKTEDTAMYYCTKGY
GDGTPAPGQGTQVTVSSGGGSQVQLQESGGGSVQAGGSLRLSCAASRFTY
SSYCMGWFRQAPGKEREGVASIDSDGSTSYTDSVKGRFTISKDNAKNTLY
LQMNSLKPEDTAMYYCALDLMSTVVPGFCGFLLSAGMDYWGKGTQVTVSS
ASHHHHHH;
DR393(DR229-DR237)
>SEQ ID NO: 98
QVQLQESGGGLVQPGGSLRLSCTASGFSFSSYPMTWARQAPGKGLEWVST
IASDGGSTAYAASVEGRFTISRDNAKSTLYLQLNSLKTEDTAMYYCTKGY
GDGTPAPGQGTQVTVSSGGGSQVQLQESGGGSVQAGGSLRLSCAASGYTY
SMYCMGWFRQAPGKEREGVAQINSDGSTSYADSVKGRFTISKDNAKNTLY
LQMNSLKPEDTAMYYCAADSRVYGGSWYERLCGPYTYEYNYWGQGTQVTV
SSASHHHHHH;
DR394(DR229-DR238)
>SEQ ID NO: 99
QVQLQESGGGLVQPGGSLRLSCTASGFSFSSYPMTWARQAPGKGLEWVST
IASDGGSTAYAASVEGRFTISRDNAKSTLYLQLNSLKTEDTAMYYCTKGY
GDGTPAPGQGTQVTVSSGGGSQVQLQESGGGSVQAGGSLRLSCAVSGYAY
STYCMGWFRQAPGKEREGVAAIDSGGSTSYADSVKGRFTISKDNAKNTLY
LRMNSLKPEDTAMYYCAAVPPPPDGGSCLFLGPEIKVSKADFRYWGQGTQ
VTVSSASHHHHHH;
DR395(DR229-DR239)
>SEQ ID NO: 100
QVQLQESGGGLVQPGGSLRLSCTASGFSFSSYPMTWARQAPGKGLEWVST
IASDGGSTAYAASVEGRFTISRDNAKSTLYLQLNSLKTEDTAMYYCTKGY
GDGTPAPGQGTQVTVSSGGGSQVQLQESGGGSVQAGGSLRLSCTVSGYTY
SSNCMGWFRQAPGKEREGVATIYTGGGNTYYADSVKGRFTISQDNAKNTV
YLQMNNLKPEDTAMYYCAAEPLSRVYGGSCPTPTFDYWGQGTQVTVSSAS
HHHHHH;
DR396(DR229-DR240)
>SEQ ID NO: 101
QVQLQESGGGLVQPGGSLRLSCTASGFSFSSYPMTWARQAPGKGLEWVST
IASDGGSTAYAASVEGRFTISRDNAKSTLYLQLNSLKTEDTAMYYCTKGY
GDGTPAPGQGTQVTVSSGGGSQVQLQESGGGSVQAGGSLRLSCGASGYTY
SSYCMGWFRQVPGKEREGVAVIDSDGSTSYADSVKGRFTISKDNGKNTLY
LQMNSLKPEDTAMYYCAADLGHYRPPCGVLYLGMDYWGKGTQVTVSSASH
HHHHH;
DR397(DR229-DR241)
>SEQ ID NO: 102
QVQLQESGGGLVQPGGSLRLSCTASGFSFSSYPMTWARQAPGKGLEWVST
IASDGGSTAYAASVEGRFTISRDNAKSTLYLQLNSLKTEDTAMYYCTKGY
GDGTPAPGQGTQVTVSSGGGSQVQLQESGGGSVQAGGSLRLSCAASGYSN
CSYDMTWYRQAPGKEREFVSAIHSDGSTRYADSVKGRFFISQDNAKNTVY
LQMNSLKPEDTAMYYCKTDPLHCRAHGGSWYSVRANYWGQGTQVTVSSAS
HHHHHH;
DR398(DR230-DR235)
>SEQ ID NO: 103
QVQLQESGGGLVQPGGSLRLSCAASGFTFSSAHMSWVRQAPGKGREWIAS
IYSGGGTFYADSVKGRFTISRDNAKNTLYLQLNSLKAEDTAMYYCATNRL
HYYSDDDSLRGQGTQVTVSSGGGSQVQLQESGGGSVQAGGSLRLSCAASR
YLYSIDYMAWFRQSPGKEREPVAVIYTASGATFYPDSVKGRFTISQDNAK
MTVYLQMNSLKSEDTAMYYCAAVRKTDSYLFDAQSFTYWGQGTQVTVSSA
SHHHHHH;
DR399(DR230-DR236)
>SEQ ID NO: 104
QVQLQESGGGLVQPGGSLRLSCAASGFTFSSAHMSWVRQAPGKGREWIAS
IYSGGGTFYADSVKGRFTISRDNAKNTLYLQLNSLKAEDTAMYYCATNRL
HYYSDDDSLRGQGTQVTVSSGGGSQVQLQESGGGSVQAGGSLRLSCAASR
FTYSSYCMGWFRQAPGKEREGVASIDSDGSTSYTDSVKGRFTISKDNAKN
TLYLQMNSLKPEDTAMYYCALDLMSTVVPGFCGFLLSAGMDYWGKGTQVT
VSSASHHHHHH;
DR400(DR230-DR237)
>SEQ ID NO: 105
QVQLQESGGGLVQPGGSLRLSCAASGFTFSSAHMSWVRQAPGKGREWIAS
IYSGGGTFYADSVKGRFTISRDNAKNTLYLQLNSLKAEDTAMYYCATNRL
HYYSDDDSLRGQGTQVTVSSGGGSQVQLQESGGGSVQAGGSLRLSCAASG
YTYSMYCMGWFRQAPGKEREGVAQINSDGSTSYADSVKGRFTISKDNAKN
TLYLQMNSLKPEDTAMYYCAADSRVYGGSWYERLCGPYTYEYNYWGQGTQ
VTVSSASHHHHHH;
DR401(DR230-DR238)
>SEQ ID NO: 106
QVQLQESGGGLVQPGGSLRLSCAASGFTFSSAHMSWVRQAPGKGREWIAS
IYSGGGTFYADSVKGRFTISRDNAKNTLYLQLNSLKAEDTAMYYCATNRL
HYYSDDDSLRGQGTQVTVSSGGGSQVQLQESGGGSVQAGGSLRLSCAVSG
YAYSTYCMGWFRQAPGKEREGVAAIDSGGSTSYADSVKGRFTISKDNAKN
TLYLRMNSLKPEDTAMYYCAAVPPPPDGGSCLFLGPEIKVSKADFRYWGQ
GTQVTVSSASHHHHHH;
DR402(DR230-DR239)
>SEQ ID NO: 107
QVQLQESGGGLVQPGGSLRLSCAASGFTFSSAHMSWVRQAPGKGREWIAS
IYSGGGTFYADSVKGRFTISRDNAKNTLYLQLNSLKAEDTAMYYCATNRL
HYYSDDDSLRGQGTQVTVSSGGGSQVQLQESGGGSVQAGGSLRLSCTVSG
YTYSSNCMGWFRQAPGKEREGVATIYTGGGNTYYADSVKGRFTISQDNAK
NTVYLQMNNLKPEDTAMYYCAAEPLSRVYGGSCPTPTFDYWGQGTQVTVS
SASHHHHHH;
DR403(DR230-DR240)
>SEQ ID NO: 108
QVQLQESGGGLVQPGGSLRLSCAASGFTFSSAHMSWVRQAPGKGREWIAS
IYSGGGTFYADSVKGRFTISRDNAKNTLYLQLNSLKAEDTAMYYCATNRL
HYYSDDDSLRGQGTQVTVSSGGGSQVQLQESGGGSVQAGGSLRLSCGASG
YTYSSYCMGWFRQVPGKEREGVAVIDSDGSTSYADSVKGRFTISKDNGKN
TLYLQMNSLKPEDTAMYYCAADLGHYRPPCGVLYLGMDYWGKGTQVTVSS
ASHHHHHH;
DR404(DR230-DR241)
>SEQ ID NO: 109
QVQLQESGGGLVQPGGSLRLSCAASGFTFSSAHMSWVRQAPGKGREWIAS
IYSGGGTFYADSVKGRFTISRDNAKNTLYLQLNSLKAEDTAMYYCATNRL
HYYSDDDSLRGQGTQVTVSSGGGSQVQLQESGGGSVQAGGSLRLSCAASG
YSNCSYDMTWYRQAPGKEREFVSAIHSDGSTRYADSVKGRFFISQDNAKN
TVYLQMNSLKPEDTAMYYCKTDPLHCRAHGGSWYSVRANYWGQGTQVTVS
SASHHHHHH;
DR405(DR231-DR235)
>SEQ ID NO: 110
QVQLQESGGGSVQAGGSLRLSCTASGFTFDDREMNWYRQAPGNECELVST
ISSDGSTYYADSVKGRFTISQDNAKNTVYLQMDSVKPEDTAVYYCAADFM
IAIQAPGAGCWGQGTQVTVSSGGGSQVQLQESGGGSVQAGGSLRLSCAAS
RYLYSIDYMAWFRQSPGKEREPVAVIYTASGATFYPDSVKGRFTISQDNA
KMTVYLQMNSLKSEDTAMYYCAAVRKTDSYLFDAQSFTYWGQGTQVTVSS
ASHHHHHH;
DR406(DR231-DR236)
>SEQ ID NO: 111
QVQLQESGGGSVQAGGSLRLSCTASGFTFDDREMNWYRQAPGNECELVST
ISSDGSTYYADSVKGRFTISQDNAKNTVYLQMDSVKPEDTAVYYCAADFM
IAIQAPGAGCWGQGTQVTVSSGGGSQVQLQESGGGSVQAGGSLRLSCAAS
RFTYSSYCMGWFRQAPGKEREGVASIDSDGSTSYTDSVKGRFTISKDNAK
NTLYLQMNSLKPEDTAMYYCALDLMSTVVPGFCGFLLSAGMDYWGKGTQV
TVSSASHHHHHH;
DR407(DR231-DR237)
>SEQ ID NO: 112
QVQLQESGGGSVQAGGSLRLSCTASGFTFDDREMNWYRQAPGNECELVST
ISSDGSTYYADSVKGRFTISQDNAKNTVYLQMDSVKPEDTAVYYCAADFM
IAIQAPGAGCWGQGTQVTVSSGGGSQVQLQESGGGSVQAGGSLRLSCAAS
GYTYSMYCMGWFRQAPGKEREGVAQINSDGSTSYADSVKGRFTISKDNAK
NTLYLQMNSLKPEDTAMYYCAADSRVYGGSWYERLCGPYTYEYNYWGQGT
QVTVSSASHHHHHH;
DR408(DR231-DR238)
>SEQ ID NO: 113
QVQLQESGGGSVQAGGSLRLSCTASGFTFDDREMNWYRQAPGNECELVST
ISSDGSTYYADSVKGRFTISQDNAKNTVYLQMDSVKPEDTAVYYCAADFM
IAIQAPGAGCWGQGTQVTVSSGGGSQVQLQESGGGSVQAGGSLRLSCAVS
GYAYSTYCMGWFRQAPGKEREGVAAIDSGGSTSYADSVKGRFTISKDNAK
NTLYLRMNSLKPEDTAMYYCAAVPPPPDGGSCLFLGPEIKVSKADFRYWG
QGTQVTVSSASHHHHHH;
DR409(DR231-DR239)
>SEQ ID NO: 114
QVQLQESGGGSVQAGGSLRLSCTASGFTFDDREMNWYRQAPGNECELVST
ISSDGSTYYADSVKGRFTISQDNAKNTVYLQMDSVKPEDTAVYYCAADFM
IAIQAPGAGCWGQGTQVTVSSGGGSQVQLQESGGGSVQAGGSLRLSCTVS
GYTYSSNCMGWFRQAPGKEREGVATIYTGGGNTYYADSVKGRFTISQDNA
KNTVYLQMNNLKPEDTAMYYCAAEPLSRVYGGSCPTPTFDYWGQGTQVTV
SSASHHHHHH;
DR410(DR231-DR240)
>SEQ ID NO: 115
QVQLQESGGGSVQAGGSLRLSCTASGFTFDDREMNWYRQAPGNECELVST
ISSDGSTYYADSVKGRFTISQDNAKNTVYLQMDSVKPEDTAVYYCAADFM
IAIQAPGAGCWGQGTQVTVSSGGGSQVQLQESGGGSVQAGGSLRLSCGAS
GYTYSSYCMGWFRQVPGKEREGVAVIDSDGSTSYADSVKGRFTISKDNGK
NTLYLQMNSLKPEDTAMYYCAADLGHYRPPCGVLYLGMDYWGKGTQVTVS
SASHHHHHH;
DR411(DR231-DR241)
>SEQ ID NO: 116
QVQLQESGGGSVQAGGSLRLSCTASGFTFDDREMNWYRQAPGNECELVST
ISSDGSTYYADSVKGRFTISQDNAKNTVYLQMDSVKPEDTAVYYCAADFM
IAIQAPGAGCWGQGTQVTVSSGGGSQVQLQESGGGSVQAGGSLRLSCAAS
GYSNCSYDMTWYRQAPGKEREFVSAIHSDGSTRYADSVKGRFFISQDNAK
NTVYLQMNSLKPEDTAMYYCKTDPLHCRAHGGSWYSVRANYWGQGTQVTV
SSASHHHHHH;
DR412(DR232-DR235)
>SEQ ID NO: 117
QVQLQESGGGSVQAGGSLRLSCVASGYTSCMGWFRQAPGKEREAVATIYT
RGRSIYYADSVKGRFTISQDNAKNTLYLQMNSLKPEDIAMYSCAAGGYSW
SAGCEFNYWGQGTQVTVSSGGGSQVQLQESGGGSVQAGGSLRLSCAASRY
LYSIDYMAWFRQSPGKEREPVAVIYTASGATFYPDSVKGRFTISQDNAKM
TVYLQMNSLKSEDTAMYYCAAVRKTDSYLFDAQSFTYWGQGTQVTVSSAS
HHHHHH;
DR413(DR232-DR236)
>SEQ ID NO: 118
QVQLQESGGGSVQAGGSLRLSCVASGYTSCMGWFRQAPGKEREAVATIYT
RGRSIYYADSVKGRFTISQDNAKNTLYLQMNSLKPEDIAMYSCAAGGYSW
SAGCEFNYWGQGTQVTVSSGGGSQVQLQESGGGSVQAGGSLRLSCAASRF
TYSSYCMGWFRQAPGKEREGVASIDSDGSTSYTDSVKGRFTISKDNAKNT
LYLQMNSLKPEDTAMYYCALDLMSTVVPGFCGFLLSAGMDYWGKGTQVTV
SSASHHHHHH;
DR414(DR232-DR237)
>SEQ ID NO: 119
QVQLQESGGGSVQAGGSLRLSCVASGYTSCMGWFRQAPGKEREAVATIYT
RGRSIYYADSVKGRFTISQDNAKNTLYLQMNSLKPEDIAMYSCAAGGYSW
SAGCEFNYWGQGTQVTVSSGGGSQVQLQESGGGSVQAGGSLRLSCAASGY
TYSMYCMGWFRQAPGKEREGVAQINSDGSTSYADSVKGRFTISKDNAKNT
LYLQMNSLKPEDTAMYYCAADSRVYGGSWYERLCGPYTYEYNYWGQGTQV
TVSSASHHHHHH;
DR415(DR232-DR238)
>SEQ ID NO: 120
QVQLQESGGGSVQAGGSLRLSCVASGYTSCMGWFRQAPGKEREAVATIYT
RGRSIYYADSVKGRFTISQDNAKNTLYLQMNSLKPEDIAMYSCAAGGYSW
SAGCEFNYWGQGTQVTVSSGGGSQVQLQESGGGSVQAGGSLRLSCAVSGY
AYSTYCMGWFRQAPGKEREGVAAIDSGGSTSYADSVKGRFTISKDNAKNT
LYLRMNSLKPEDTAMYYCAAVPPPPDGGSCLFLGPEIKVSKADFRYWGQG
TQVTVSSASHHHHHH;
DR416(DR232-DR239)
>SEQ ID NO: 121
QVQLQESGGGSVQAGGSLRLSCVASGYTSCMGWFRQAPGKEREAVATIYT
RGRSIYYADSVKGRFTISQDNAKNTLYLQMNSLKPEDIAMYSCAAGGYSW
SAGCEFNYWGQGTQVTVSSGGGSQVQLQESGGGSVQAGGSLRLSCTVSGY
TYSSNCMGWFRQAPGKEREGVATIYTGGGNTYYADSVKGRFTISQDNAKN
TVYLQMNNLKPEDTAMYYCAAEPLSRVYGGSCPTPTFDYWGQGTQVTVSS
ASHHHHHH;
DR417(DR232-DR240)
>SEQ ID NO: 122
QVQLQESGGGSVQAGGSLRLSCVASGYTSCMGWFRQAPGKEREAVATIYT
RGRSIYYADSVKGRFTISQDNAKNTLYLQMNSLKPEDIAMYSCAAGGYSW
SAGCEFNYWGQGTQVTVSSGGGSQVQLQESGGGSVQAGGSLRLSCGASGY
TYSSYCMGWFRQVPGKEREGVAVIDSDGSTSYADSVKGRFTISKDNGKNT
LYLQMNSLKPEDTAMYYCAADLGHYRPPCGVLYLGMDYWGKGTQVTVSSA
SHHHHHH;
DR418(DR232-DR241)
>SEQ ID NO: 123
QVQLQESGGGSVQAGGSLRLSCVASGYTSCMGWFRQAPGKEREAVATIYT
RGRSIYYADSVKGRFTISQDNAKNTLYLQMNSLKPEDIAMYSCAAGGYSW
SAGCEFNYWGQGTQVTVSSGGGSQVQLQESGGGSVQAGGSLRLSCAASGY
SNCSYDMTWYRQAPGKEREFVSAIHSDGSTRYADSVKGRFFISQDNAKNT
VYLQMNSLKPEDTAMYYCKTDPLHCRAHGGSWYSVRANYWGQGTQVTVSS
ASHHHHHH;
DR419(DR233-DR235)
>SEQ ID NO: 124
QVQLQESGGGSVQAGGSLRLSCTASGFTFDDSDMgWYRQAPGNECELVST
ISSDGSTYYADSVKGRFTISQDNAKNTVYLQMNSLKPEDTAVYYCAAEPR
GYYSNYGGRRECNYWGQGTQVTVSSGGGSQVQLQESGGGSVQAGGSLRLS
CAASRYLYSIDYMAWFRQSPGKEREPVAVIYTASGATFYPDSVKGRFTIS
QDNAKMTVYLQMNSLKSEDTAMYYCAAVRKTDSYLFDAQSFTYWGQGTQV
TVSSASHHHHHH;
DR420(DR233-DR236)
>SEQ ID NO: 125
QVQLQESGGGSVQAGGSLRLSCTASGFTFDDSDMGWYRQAPGNECELVST
ISSDGSTYYADSVKGRFTISQDNAKNTVYLQMNSLKPEDTAVYYCAAEPR
GYYSNYGGRRECNYWGQGTQVTVSSGGGSQVQLQESGGGSVQAGGSLRLS
CAASRFTYSSYCMGWFRQAPGKEREGVASIDSDGSTSYTDSVKGRFTISK
DNAKNTLYLQMNSLKPEDTAMYYCALDLMSTVVPGFCGFLLSAGMDYWGK
GTQVTVSSASHHHHHH;
DR421(DR233-DR237)
>SEQ ID NO: 126
QVQLQESGGGSVQAGGSLRLSCTASGFTFDDSDMGWYRQAPGNECELVST
ISSDGSTYYADSVKGRFTISQDNAKNTVYLQMNSLKPEDTAVYYCAAEPR
GYYSNYGGRRECNYWGQGTQVTVSSGGGSQVQLQESGGGSVQAGGSLRLS
CAASGYTYSMYCMGWFRQAPGKEREGVAQINSDGSTSYADSVKGRFTISK
DNAKNTLYLQMNSLKPEDTAMYYCAADSRVYGGSWYERLCGPYTYEYNYW
GQGTQVTVSSASHHHHHH;
DR422(DR233-DR238)
>SEQ ID NO: 127
QVQLQESGGGSVQAGGSLRLSCTASGFTFDDSDMGWYRQAPGNECELVST
ISSDGSTYYADSVKGRFTISQDNAKNTVYLQMNSLKPEDTAVYYCAAEPR
GYYSNYGGRRECNYWGQGTQVTVSSGGGSQVQLQESGGGSVQAGGSLRLS
CAVSGYAYSTYCMGWFRQAPGKEREGVAAIDSGGSTSYADSVKGRFTISK
DNAKNTLYLRMNSLKPEDTAMYYCAAVPPPPDGGSCLFLGPEIKVSKADF
RYWGQGTQVTVSSASHHHHHH;
DR423(DR233-DR239)
>SEQ ID NO: 128
QVQLQESGGGSVQAGGSLRLSCTASGFTFDDSDMGWYRQAPGNECELVST
ISSDGSTYYADSVKGRFTISQDNAKNTVYLQMNSLKPEDTAVYYCAAEPR
GYYSNYGGRRECNYWGQGTQVTVSSGGGSQVQLQESGGGSVQAGGSLRLS
CTVSGYTYSSNCMGWFRQAPGKEREGVATIYTGGGNTYYADSVKGRFTIS
QDNAKNTVYLQMNNLKPEDTAMYYCAAEPLSRVYGGSCPTPTFDYWGQGT
QVTVSSASHHHHHH;
DR424(DR233-DR240)
>SEQ ID NO: 129
QVQLQESGGGSVQAGGSLRLSCTASGFTFDDSDMGWYRQAPGNECELVST
ISSDGSTYYADSVKGRFTISQDNAKNTVYLQMNSLKPEDTAVYYCAAEPR
GYYSNYGGRRECNYWGQGTQVTVSSGGGSQVQLQESGGGSVQAGGSLRLS
CGASGYTYSSYCMGWFRQVPGKEREGVAVIDSDGSTSYADSVKGRFTISK
DNGKNTLYLQMNSLKPEDTAMYYCAADLGHYRPPCGVLYLGMDYWGKGTQ
VTVSSASHHHHHH;
DR425(DR233-DR241)
>SEQ ID NO: 130
QVQLQESGGGSVQAGGSLRLSCTASGFTFDDSDMGWYRQAPGNECELVST
ISSDGSTYYADSVKGRFTISQDNAKNTVYLQMNSLKPEDTAVYYCAAEPR
GYYSNYGGRRECNYWGQGTQVTVSSGGGSQVQLQESGGGSVQAGGSLRLS
CAASGYSNCSYDMTWYRQAPGKEREFVSAIHSDGSTRYADSVKGRFFISQ
DNAKNTVYLQMNSLKPEDTAMYYCKTDPLHCRAHGGSWYSVRANYWGQGT
QVTVSSASHHHHHH;
DR426(DR234-DR235)
>SEQ ID NO: 131
QVQLQESGGGSVQAGGSLRLSCVASGYTFSSYCMGWFRQAPGKEREGVAA
LGGGSTYYADSVKGRFTISQDNAKNTLYLQMNSLKPEDTAMYYCAAAWVA
CLEFGGSWYDLARYKHWGQGTQVTVSSGGGSQVQLQESGGGSVQAGGSLR
LSCAASRYLYSIDYMAWFRQSPGKEREPVAVIYTASGATFYPDSVKGRFT
ISQDNAKMTVYLQMNSLKSEDTAMYYCAAVRKTDSYLFDAQSFTYWGQGT
QVTVSSASHHHHHH;
DR427(DR234-DR236)
>SEQ ID NO: 132
QVQLQESGGGSVQAGGSLRLSCVASGYTFSSYCMGWFRQAPGKEREGVAA
LGGGSTYYADSVKGRFTISQDNAKNTLYLQMNSLKPEDTAMYYCAAAWVA
CLEFGGSWYDLARYKHWGQGTQVTVSSGGGSQVQLQESGGGSVQAGGSLR
LSCAASRFTYSSYCMGWFRQAPGKEREGVASIDSDGSTSYTDSVKGRFTI
SKDNAKNTLYLQMNSLKPEDTAMYYCALDLMSTVVPGFCGFLLSAGMDYW
GKGTQVTVSSASHHHHHH;
DR428(DR234-DR237)
>SEQ ID NO: 133
QVQLQESGGGSVQAGGSLRLSCVASGYTFSSYCMGWFRQAPGKEREGVAA
LGGGSTYYADSVKGRFTISQDNAKNTLYLQMNSLKPEDTAMYYCAAAWVA
CLEFGGSWYDLARYKHWGQGTQVTVSSGGGSQVQLQESGGGSVQAGGSLR
LSCAASGYTYSMYCMGWFRQAPGKEREGVAQINSDGSTSYADSVKGRFTI
SKDNAKNTLYLQMNSLKPEDTAMYYCAADSRVYGGSWYERLCGPYTYEYN
YWGQGTQVTVSSASHHHHHH;
DR429(DR234-DR238)
>SEQ ID NO: 134
QVQLQESGGGSVQAGGSLRLSCVASGYTFSSYCMGWFRQAPGKEREGVAA
LGGGSTYYADSVKGRFTISQDNAKNTLYLQMNSLKPEDTAMYYCAAAWVA
CLEFGGSWYDLARYKHWGQGTQVTVSSGGGSQVQLQESGGGSVQAGGSLR
LSCAVSGYAYSTYCMGWFRQAPGKEREGVAAIDSGGSTSYADSVKGRFTI
SKDNAKNTLYLRMNSLKPEDTAMYYCAAVPPPPDGGSCLFLGPEIKVSKA
DFRYWGQGTQVTVSSASHHHHHH;
DR430(DR234-DR239)
>SEQ ID NO: 135
QVQLQESGGGSVQAGGSLRLSCVASGYTFSSYCMGWFRQAPGKEREGVAA
LGGGSTYYADSVKGRFTISQDNAKNTLYLQMNSLKPEDTAMYYCAAAWVA
CLEFGGSWYDLARYKHWGQGTQVTVSSGGGSQVQLQESGGGSVQAGGSLR
LSCTVSGYTYSSNCMGWFRQAPGKEREGVATIYTGGGNTYYADSVKGRFT
ISQDNAKNTVYLQMNNLKPEDTAMYYCAAEPLSRVYGGSCPTPTFDYWGQ
GTQVTVSSASHHHHHH;
DR431(DR234-DR240)
>SEQ ID NO: 136
QVQLQESGGGSVQAGGSLRLSCVASGYTFSSYCMGWFRQAPGKEREGVAA
LGGGSTYYADSVKGRFTISQDNAKNTLYLQMNSLKPEDTAMYYCAAAWVA
CLEFGGSWYDLARYKHWGQGTQVTVSSGGGSQVQLQESGGGSVQAGGSLR
LSCGASGYTYSSYCMGWFRQVPGKEREGVAVIDSDGSTSYADSVKGRFTI
SKDNGKNTLYLQMNSLKPEDTAMYYCAADLGHYRPPCGVLYLGMDYWGKG
TQVTVSSASHHHHHH;
DR432(DR234-DR241)
>SEQ ID NO: 137
QVQLQESGGGSVQAGGSLRLSCVASGYTFSSYCMGWFRQAPGKEREGVAA
LGGGSTYYADSVKGRFTISQDNAKNTLYLQMNSLKPEDTAMYYCAAAWVA
CLEFGGSWYDLARYKHWGQGTQVTVSSGGGSQVQLQESGGGSVQAGGSLR
LSCAASGYSNCSYDMTWYRQAPGKEREFVSAIHSDGSTRYADSVKGRFFI
SQDNAKNTVYLQMNSLKPEDTAMYYCKTDPLHCRAHGGSWYSVRANYWGQ
GTQVTVSSASHHHHHH;
DR433(DR235-DR229)
>SEQ ID NO: 138
QVQLQESGGGSVQAGGSLRLSCAASRYLYSIDYMAWFRQSPGKEREPVAV
IYTASGATFYPDSVKGRFTISQDNAKMTVYLQMNSLKSEDTAMYYCAAVR
KTDSYLFDAQSFTYWGQGTQVTVSSGGGSQVQLQESGGGLVQPGGSLRLS
CTASGFSFSSYPMTWARQAPGKGLEWVSTIASDGGSTAYAASVEGRFTIS
RDNAKSTLYLQLNSLKTEDTAMYYCTKGYGDGTPAPGQGTQVTVSSASHH
HHHH;
DR434(DR235-DR230)
>SEQ ID NO: 139
QVQLQESGGGSVQAGGSLRLSCAASRYLYSIDYMAWFRQSPGKEREPVAV
IYTASGATFYPDSVKGRFTISQDNAKMTVYLQMNSLKSEDTAMYYCAAVR
KTDSYLFDAQSFTYWGQGTQVTVSSGGGSQVQLQESGGGLVQPGGSLRLS
CAASGFTFSsahmsWVRQAPGKGREWIASIYSGGGTFYADSVKGRFTISR
DNAKNTLYLQLNSLKAEDTAMYYCATNRLHYYSDDDSLRGQGTQVTVSSA
SHHHHHH;
DR435(DR235-DR231)
>SEQ ID NO: 140
QVQLQESGGGSVQAGGSLRLSCAASRYLYSIDYMAWFRQSPGKEREPVAV
IYTASGATFYPDSVKGRFTISQDNAKMTVYLQMNSLKSEDTAMYYCAAVR
KTDSYLFDAQSFTYWGQGTQVTVSSGGGSQVQLQESGGGSVQAGGSLRLS
CTASGFTFDDREMNWYRQAPGNECELVSTISSDGSTYYADSVKGRFTISQ
DNAKNTVYLQMDSVKPEDTAVYYCAADFMIAIQAPGAGCWGQGTQVTVSS
ASHHHHHH;
DR436(DR235-DR232)
>SEQ ID NO: 141
QVQLQESGGGSVQAGGSLRLSCAASRYLYSIDYMAWFRQSPGKEREPVAV
IYTASGATFYPDSVKGRFTISQDNAKMTVYLQMNSLKSEDTAMYYCAAVR
KTDSYLFDAQSFTYWGQGTQVTVSSGGGSQVQLQESGGGSVQAGGSLRLS
CVASGYTSCMGWFRQAPGKEREAVATIYTRGRSIYYADSVKGRFTISQDN
AKNTLYLQMNSLKPEDIAMYSCAAGGYSWSAGCEFNYWGQGTQVTVSSAS
HHHHHH;
DR437(DR235-DR233)
>SEQ ID NO: 142
QVQLQESGGGSVQAGGSLRLSCAASRYLYSIDYMAWFRQSPGKEREPVAV
IYTASGATFYPDSVKGRFTISQDNAKMTVYLQMNSLKSEDTAMYYCAAVR
KTDSYLFDAQSFTYWGQGTQVTVSSGGGSQVQLQESGGGSVQAGGSLRLS
CTASGFTFDDSDMGWYRQAPGNECELVSTISSDGSTYYADSVKGRFTISQ
DNAKNTVYLQMNSLKPEDTAVYYCAAEPRGYYSNYGGRRECNYWGQGTQV
TVSSASHHHHHH;
DR438(DR235-DR234)
>SEQ ID NO: 143
QVQLQESGGGSVQAGGSLRLSCAASRYLYSIDYMAWFRQSPGKEREPVAV
IYTASGATFYPDSVKGRFTISQDNAKMTVYLQMNSLKSEDTAMYYCAAVR
KTDSYLFDAQSFTYWGQGTQVTVSSGGGSQVQLQESGGGSVQAGGSLRLS
CVASGYTFSSYCMGWFRQAPGKEREGVAALGGGSTYYADSVKGRFTISQD
NAKNTLYLQMNSLKPEDTAMYYCAAAWVACLEFGGSWYDLARYKHWGQGT
QVTVSSASHHHHHH;
DR439(DR236-DR229)
>SEQ ID NO: 144
QVQLQESGGGSVQAGGSLRLSCAASRFTYSSYCMGWFRQAPGKEREGVAS
IDSDGSTSYTDSVKGRFTISKDNAKNTLYLQMNSLKPEDTAMYYCALDLM
STVVPGFCGFLLSAGMDYWGKGTQVTVSSGGGSQVQLQESGGGLVQPGGS
LRLSCTASGFSFSSYPMTWARQAPGKGLEWVSTIASDGGSTAYAASVEGR
FTISRDNAKSTLYLQLNSLKTEDTAMYYCTKGYGDGTPAPGQGTQVTVSS
ASHHHHHH;
DR440(DR236-DR230)
>SEQ ID NO: 145
QVQLQESGGGSVQAGGSLRLSCAASRFTYSSYCMGWFRQAPGKEREGVAS
IDSDGSTSYTDSVKGRFTISKDNAKNTLYLQMNSLKPEDTAMYYCALDLM
STVVPGFCGFLLSAGMDYWGKGTQVTVSSGGGSQVQLQESGGGLVQPGGS
LRLSCAASGFTFSSAHMSWVRQAPGKGREWIASIYSGGGTFYADSVKGRF
TISRDNAKNTLYLQLNSLKAEDTAMYYCATNRLHYYSDDDSLRGQGTQVT
VSSASHHHHHH;
DR441(DR236-DR231)
>SEQ ID NO: 146
QVQLQESGGGSVQAGGSLRLSCAASRFTYSSYCMGWFRQAPGKEREGVAS
IDSDGSTSYTDSVKGRFTISKDNAKNTLYLQMNSLKPEDTAMYYCALDLM
STVVPGFCGFLLSAGMDYWGKGTQVTVSSGGGSQVQLQESGGGSVQAGGS
LRLSCTASGFTFDDREMNWYRQAPGNECELVSTISSDGSTYYADSVKGRF
TISQDNAKNTVYLQMDSVKPEDTAVYYCAADFMIAIQAPGAGCWGQGTQV
TVSSASHHHHHH;
DR442(DR236-DR232)
>SEQ ID NO: 147
QVQLQESGGGSVQAGGSLRLSCAASRFTYSSYCMGWFRQAPGKEREGVAS
IDSDGSTSYTDSVKGRFTISKDNAKNTLYLQMNSLKPEDTAMYYCALDLM
STVVPGFCGFLLSAGMDYWGKGTQVTVSSGGGSQVQLQESGGGSVQAGGS
LRLSCVASGYTSCMGWFRQAPGKEREAVATIYTRGRSIYYADSVKGRFTI
SQDNAKNTLYLQMNSLKPEDIAMYSCAAGGYSWSAGCEFNYWGQGTQVTV
SSASHHHHHH;
DR443(DR236-DR233)
>SEQ ID NO: 148
QVQLQESGGGSVQAGGSLRLSCAASRFTYSSYCMGWFRQAPGKEREGVAS
IDSDGSTSYTDSVKGRFTISKDNAKNTLYLQMNSLKPEDTAMYYCALDLM
STVVPGFCGFLLSAGMDYWGKGTQVTVSSGGGSQVQLQESGGGSVQAGGS
LRLSCTASGFTFDDSDMGWYRQAPGNECELVSTISSDGSTYYADSVKGRF
TISQDNAKNTVYLQMNSLKPEDTAVYYCAAEPRGYYSNYGGRRECNYWGQ
GTQVTVSSASHHHHHH;
DR444(DR236-DR234)
>SEQ ID NO: 149
QVQLQESGGGSVQAGGSLRLSCAASRFTYSSYCMGWFRQAPGKEREGVAS
IDSDGSTSYTDSVKGRFTISKDNAKNTLYLQMNSLKPEDTAMYYCALDLM
STVVPGFCGFLLSAGMDYWGKGTQVTVSSGGGSQVQLQESGGGSVQAGGS
LRLSCVASGYTFSSYCMGWFRQAPGKEREGVAALGGGSTYYADSVKGRFT
ISQDNAKNTLYLQMNSLKPEDTAMYYCAAAWVACLEFGGSWYDLARYKHW
GQGTQVTVSSASHHHHHH;
DR445(DR237-DR229)
>SEQ ID NO: 150
QVQLQESGGGSVQAGGSLRLSCAASGYTYSMYCMGWFRQAPGKEREGVAQ
INSDGSTSYADSVKGRFTISKDNAKNTLYLQMNSLKPEDTAMYYCAADSR
VYGGSWYERLCGPYTYEYNYWGQGTQVTVSSGGGSQVQLQESGGGLVQPG
GSLRLSCTASGFSFSSYPMTWARQAPGKGLEWVSTIASDGGSTAYAASVE
GRFTISRDNAKSTLYLQLNSLKTEDTAMYYCTKGYGDGTPAPGQGTQVTV
SSASHHHHHH;
DR446(DR237-DR230)
>SEQ ID NO: 151
QVQLQESGGGSVQAGGSLRLSCAASGYTYSMYCMGWFRQAPGKEREGVAQ
INSDGSTSYADSVKGRFTISKDNAKNTLYLQMNSLKPEDTAMYYCAADSR
VYGGSWYERLCGPYTYEYNYWGQGTQVTVSSGGGSQVQLQESGGGLVQPG
GSLRLSCAASGFTFSSAHMSWVRQAPGKGREWIASIYSGGGTFYADSVKG
RFTISRDNAKNTLYLQLNSLKAEDTAMYYCATNRLHYYSDDDSLRGQGTQ
VTVSSASHHHHHH;
DR447(DR237-DR231)
>SEQ ID NO: 152
QVQLQESGGGSVQAGGSLRLSCAASGYTYSMYCMGWFRQAPGKEREGVAQ
INSDGSTSYADSVKGRFTISKDNAKNTLYLQMNSLKPEDTAMYYCAADSR
VYGGSWYERLCGPYTYEYNYWGQGTQVTVSSGGGSQVQLQESGGGSVQAG
GSLRLSCTASGFTFDDREMNWYRQAPGNECELVSTISSDGSTYYADSVKG
RFTISQDNAKNTVYLQMDSVKPEDTAVYYCAADFMIAIQAPGAGCWGQGT
QVTVSSASHHHHHH;
DR448(DR237-DR232)
>SEQ ID NO: 153
QVQLQESGGGSVQAGGSLRLSCAASGYTYSMYCMGWFRQAPGKEREGVAQ
INSDGSTSYADSVKGRFTISKDNAKNTLYLQMNSLKPEDTAMYYCAADSR
VYGGSWYERLCGPYTYEYNYWGQGTQVTVSSGGGSQVQLQESGGGSVQAG
GSLRLSCVASGYTSCMGWFRQAPGKEREAVATIYTRGRSIYYADSVKGRF
TISQDNAKNTLYLQMNSLKPEDIAMYSCAAGGYSWSAGCEFNYWGQGTQV
TVSSASHHHHHH;
DR449(DR237-DR233)
>SEQ ID NO: 154
QVQLQESGGGSVQAGGSLRLSCAASGYTYSMYCMGWFRQAPGKEREGVAQ
INSDGSTSYADSVKGRFTISKDNAKNTLYLQMNSLKPEDTAMYYCAADSR
VYGGSWYERLCGPYTYEYNYWGQGTQVTVSSGGGSQVQLQESGGGSVQAG
GSLRLSCTASGFTFDDSDMGWYRQAPGNECELVSTISSDGSTYYADSVKG
RFTISQDNAKNTVYLQMNSLKPEDTAVYYCAAEPRGYYSNYGGRRECNYW
GQGTQVTVSSASHHHHHH;
DR450(DR237-DR234)
>SEQ ID NO: 155
QVQLQESGGGSVQAGGSLRLSCAASGYTYSMYCMGWFRQAPGKEREGVAQ
INSDGSTSYADSVKGRFTISKDNAKNTLYLQMNSLKPEDTAMYYCAADSR
VYGGSWYERLCGPYTYEYNYWGQGTQVTVSSGGGSQVQLQESGGGSVQAG
GSLRLSCVASGYTFSSYCMGWFRQAPGKEREGVAALGGGSTYYADSVKGR
FTISQDNAKNTLYLQMNSLKPEDTAMYYCAAAWVACLEFGGSWYDLARYK
hWGQGTQVTVSSASHHHHHH;
DR451(DR238-DR229)
>SEQ ID NO: 156
QVQLQESGGGSVQAGGSLRLSCAVSGYAYSTYCMGWFRQAPGKEREGVAA
IDSGGSTSYADSVKGRFTISKDNAKNTLYLRMNSLKPEDTAMYYCAAVPP
PPDGGSCLFLGPEIKVSKADFRYWGQGTQVTVSSGGGSQVQLQESGGGLV
QPGGSLRLSCTASGFSFSSYPMTWARQAPGKGLEWVStIASDGGSTAYAA
SVEGRFTISRDNAKSTLYLQLNSLKTEDTAMYYCTKGYGDGTPAPGQGTQ
VTVSSASHHHHHH;
DR452(DR238-DR230)
>SEQ ID NO: 157
QVQLQESGGGSVQAGGSLRLSCAVSGYAYSTYCMGWFRQAPGKEREGVAA
IDSGGSTSYADSVKGRFTISKDNAKNTLYLRMNSLKPEDTAMYYCAAVPP
PPDGGSCLFLGPEIKVSKADFRYWGQGTQVTVSSgggsQVQLQESGGGLV
QPGGSLRLSCAASGFTFSSAHMSWVRQAPGKGREWIASIYSGGGTFYADS
VKGRFTISRDNAKNTLYLQLNSLKAEDTAMYYCATNRLHYYSDDDSLRGQ
GTQVTVSSASHHHHHH;
DR453(DR238-DR231)
>SEQ ID NO: 158
QVQLQESGGGSVQAGGSLRLSCAVSGYAYSTYCMGWFRQAPGKEREGVAA
IDSGGSTSYADSVKGRFTISKDNAKNTLYLRMNSLKPEDTAMYYCAAVPP
PPDGGSCLFLGPEIKVSKADFRYWGQGTQVTVSSGGGSQVQLQESGGGSV
QAGGSLRLSCTASGFTFDDREMNWYRQAPGNECELVSTISSDGSTYYADS
VKGRFTISQDNAKNTVYLQMDSVKPEDTAVYYCAADFMIAIQAPGAGCWG
QGTQVTVSSASHHHHHH;
DR454(DR238-DR232)
>SEQ ID NO: 159
QVQLQESGGGSVQAGGSLRLSCAVSGYAYSTYCMGWFRQAPGKEREGVAA
IDSGGSTSYADSVKGRFTISKDNAKNTLYLRMNSLKPEDTAMYYCAAVPP
PPDGGSCLFLGPEIKVSKADFRYWGQGTQVTVSSGGGSQVQLQESGGGSV
QAGGSLRLSCVASGYTSCMGWFRQAPGKEREAVATIYTRGRSIYYADSVK
GRFTISQDNAKNTLYLQMNSLKPEDIAMYSCAAGGYSWSAGCEFNYWGQG
TQVTVSSASHHHHHH;
DR455(DR238-DR233)
>SEQ ID NO: 160
QVQLQESGGGSVQAGGSLRLSCAVSGYAYSTYCMGWFRQAPGKEREGVAA
IDSGGSTSYADSVKGRFTISKDNAKNTLYLRMNSLKPEDTAMYYCAAVPP
PPDGGSCLFLGPEIKVSKADFRYWGQGTQVTVSSGGGSQVQLQESGGGSV
QAGGSLRLSCTASGFTFDDSDMGWYRQAPGNECELVSTISSDGSTYYADS
VKGRFTISQDNAKNTVYLQMNSLKPEDTAVYYCAAEPRGYYSNYGGRREC
NYWGQGTQVTVSSASHHHHHH;
DR456(DR238-DR234)
>SEQ ID NO: 161
QVQLQESGGGSVQAGGSLRLSCAVSGYAYSTYCMGWFRQAPGKEREGVAA
IDSGGSTSYADSVKGRFTISKDNAKNTLYLRMNSLKPEDTAMYYCAAVPP
PPDGGSCLFLGPEIKVSKADFRYWGQGTQVTVSSGGGSQVQLQESGGGSV
QAGGSLRLSCVASGYTFSSYCMGWFRQAPGKEREGVAALGGGSTYYADSV
KGRFTISQDNAKNTLYLQMNSLKPEDTAMYYCAAAWVACLEFGGSWYDLA
RYKHWGQGTQVTVSSASHHHHHH;
DR457(DR239-DR229)
>SEQ ID NO: 162
QVQLQESGGGSVQAGGSLRLSCTVSGYTYSSNCMGWFRQAPGKEREGVAT
IYTGGGNTYYADSVKGRFTISQDNAKNTVYLQMNNLKPEDTAMYYCAAEP
LSRVYGGSCPTPTFDYWGQGTQVTVSSGGGSQVQLQESGGGLVQPGGSLR
LSCTASGFSFSSYPMTWARQAPGKGLEWVSTIASDGGSTAYAASVEGRFT
ISRDNAKSTLYLQLNSLKTEDTAMYYCTKGYGDGTPAPGQGTQVTVSSAS
HHHHHH;
DR458(DR239-DR230)
>SEQ ID NO: 163
QVQLQESGGGSVQAGGSLRLSCTVSGYTYSSNCMGWFRQAPGKEREGVAT
IYTGGGNTYYADSVKGRFTISQDNAKNTVYLQMNNLKPEDTAMYYCAAEP
LSRVYGGSCPTPTFDYWGQGTQVTVSSGGGSQVQLQESGGGLVQPGGSLR
LSCAASGFTFSSAHMSWVRQAPGKGREWIASIYSGGGTFYADSVKGRFTI
SRDNAKNTLYLQLNSLKAEDTAMYYCATNRLHYYSDDDSLRGQGTQVTVS
SASHHHHHH;
DR459(DR239-DR231)
>SEQ ID NO: 164
QVQLQESGGGSVQAGGSLRLSCTVSGYTYSSNCMGWFRQAPGKEREGVAT
IYTGGGNTYYADSVKGRFTISQDNAKNTVYLQMNNLKPEDTAMYYCAAEP
LSRVYGGSCPTPTFDYWGQGTQVTVSSGGGSQVQLQESGGGSVQAGGSLR
LSCTASGFTFDDREMNWYRQAPGNECELVSTISSDGSTYYADSVKGRFTI
SQDNAKNTVYLQMDSVKPEDTAVYYCAADFMIAIQAPGAGCWGQGTQVTV
SSASHHHHHH;
DR460(DR239-DR232)
>SEQ ID NO: 165
QVQLQESGGGSVQAGGSLRLSCTVSGYTYSSNCMGWFRQAPGKEREGVAT
IYTGGGNTYYADSVKGRFTISQDNAKNTVYLQMNNLKPEDTAMYYCAAEP
LSRVYGGSCPTPTFDYWGQGTQVTVSSGGGSQVQLQESGGGSVQAGGSLR
LSCVASGYTSCMGWFRQAPGKEREAVATIYTRGRSIYYADSVKGRFTISQ
DNAKNTLYLQMNSLKPEDIAMYSCAAGGYSWSAGCEFNYWGQGTQVTVSS
ASHHHHHH;
DR461(DR239-DR233)
>SEQ ID NO: 166
QVQLQESGGGSVQAGGSLRLSCTVSGYTYSSNCMGWFRQAPGKEREGVAT
IYTGGGNTYYADSVKGRFTISQDNAKNTVYLQMNNLKPEDTAMYYCAAEP
LSRVYGGSCPTPTFDYWGQGTQVTVSSGGGSQVQLQESGGGSVQAGGSLR
LSCTASGFTFDDSDMGWYRQAPGNECELVSTISSDGSTYYADSVKGRFTI
SQDNAKNTVYLQMNSLKPEDTAVYYCAAEPRGYYSNYGGRRECNYWGQGT
QVTVSSASHHHHHH;
DR462(DR239-DR234)
>SEQ ID NO: 167
QVQLQESGGGSVQAGGSLRLSCTVSGYTYSSNCMGWFRQAPGKEREGVAT
IYTGGGNTYYADSVKGRFTISQDNAKNTVYLQMNNLKPEDTAMYYCAAEP
LSRVYGGSCPTPTFDYWGQGTQVTVSSGGGSQVQLQESGGGSVQAGGSLR
LSCVASGYTFSSYCMGWFRQAPGKEREGVAALGGGSTYYADSVKGRFTIS
QDNAKNTLYLQMNSLKPEDTAMYYCAAAWVACLEFGGSWYDLARYKHWGQ
GTQVTVSSASHHHHHH;
DR463(DR240-DR229)
>SEQ ID NO: 168
QVQLQESGGGSVQAGGSLRLSCGASGYTYSSYCMGWFRQVPGKEREGVAV
IDSDGSTSYADSVKGRFTISKDNGKNTLYLQMNSLKPEDTAMYYCAADLG
HYRPPCGVLYLGMDYWGKGTQVTVSSGGGSQVQLQESGGGLVQPGGSLRL
SCTASGFSFSSYPMTWARQAPGKGLEWVSTIASDGGSTAYAASVEGRFTI
SRDNAKSTLYLQLNSLKTEDTAMYYCTKGYGDGTPAPGQGTQVTVSSASH
HHHHH;
DR464(DR240-DR230)
>SEQ ID NO: 169
QVQLQESGGGSVQAGGSLRLSCGASGYTYSSYCMGWFRQVPGKEREGVAV
IDSDGSTSYADSVKGRFTISKDNGKNTLYLQMNSLKPEDTAMYYCAADLG
HYRPPCGVLYLGMDYWGKGTQVTVSSGGGSQVQLQESGGGLVQPGGSLRL
SCAASGFTFSSAHMSWVRQAPGKGREWIASIYSGGGTFYADSVKGRFTIS
RDNAKNTLYLQLNSLKAEDTAMYYCATNRLHYYSDDDSLRGQGTQVTVSS
ASHHHHHH;
DR465(DR240-DR231)
>SEQ ID NO: 170
QVQLQESGGGSVQAGGSLRLSCGASGYTYSSYCMGWFRQVPGKEREGVAV
IDSDGSTSYADSVKGRFTISKDNGKNTLYLQMNSLKPEDTAMYYCAADLG
HYRPPCGVLYLGMDYWGKGTQVTVSSGGGSQVQLQESGGGSVQAGGSLRL
SCTASGFTFDDREMNWYRQAPGNECELVSTISSDGSTYYADSVKGRFTIS
QDNAKNTVYLQMDSVKPEDTAVYYCAADFMIAIQAPGAGCWGQGTQVTVS
SASHHHHHH;
DR466(DR240-DR232)
>SEQ ID NO: 171
QVQLQESGGGSVQAGGSLRLSCGASGYTYSSYCMGWFRQVPGKEREGVAV
IDSDGSTSYADSVKGRFTISKDNGKNTLYLQMNSLKPEDTAMYYCAADLG
HYRPPCGVLYLGMDYWGKGTQVTVSSGGGSQVQLQESGGGSVQAGGSLRL
SCVASGYTSCMGWFRQAPGKEREAVATIYTRGRSIYYADSVKGRFTISQD
NAKNTLYLQMNSLKPEDIAMYSCAAGGYSWSAGCEFNYWGQGTQVTVSSA
SHHHHHH;
DR467(DR240-DR233)
>SEQ ID NO: 172
QVQLQESGGGSVQAGGSLRLSCGASGYTYSSYCMGWFRQVPGKEREGVAV
IDSDGSTSYADSVKGRFTISKDNGKNTLYLQMNSLKPEDTAMYYCAADLG
HYRPPCGVLYLGMDYWGKGTQVTVSSGGGSQVQLQESGGGSVQAGGSLRL
SCTASGFTFDDSDMGWYRQAPGNECELVSTISSDGSTYYADSVKGRFTIS
QDNAKNTVYLQMNSLKPEDTAVYYCAAEPRGYYSNYGGRRECNYWGQGTQ
VTVSSASHHHHHH;
DR468(DR240-DR234)
>SEQ ID NO: 173
QVQLQESGGGSVQAGGSLRLSCGASGYTYSSYCMGWFRQVPGKEREGVAV
IDSDGSTSYADSVKGRFTISKDNGKNTLYLQMNSLKPEDTAMYYCAADLG
HYRPPCGVLYLGMDYWGKGTQVTVSSGGGSQVQLQESGGGSVQAGGSLRL
SCVASGYTFSSYCMGWFRQAPGKEREGVAALGGGSTYYADSVKGRFTISQ
DNAKNTLYLQMNSLKPEDTAMYYCAAAWVACLEFGGSWYDLARYKHWGQG
TQVTVSSASHHHHHH;
DR469(DR241-DR229)
>SEQ ID NO: 174
QVQLQESGGGSVQAGGSLRLSCAASGYSNCsydmtWYRQAPGKEREFVSa
ihsdgstryadsvkgRFFISQDNAKNTVYLQMNSLKPEDTAMYYCKTdpl
hcrahggswysvranyWGQGTQVTVSSgggsQVQLQESGGGLVQPGGSLR
LSCTASGFSFSsypmtWARQAPGKGLEWVStiasdggstayaasvegRFT
ISRDNAKSTLYLQLNSLKTEDTAMYYCTKgygdgtpaPGQGTQVTVSSAS
HHHHHH;
DR470(DR241-DR230)
>SEQ ID NO: 175
QVQLQESGGGSVQAGGSLRLSCAASGYSNCSYDMTWYRQAPGKEREFVSA
IHSDGSTRYADSVKGRFFISQDNAKNTVYLQMNSLKPEDTAMYYCKTDPL
HCRAHGGSWYSVRANYWGQGTQVTVSSGGGSQVQLQESGGGLVQPGGSLR
LSCAASGFTFSSAHMSWVRQAPGKGREWIASIYSGGGTFYADSVKGRFTI
SRDNAKNTLYLQLNSLKAEDTAMYYCATNRLHYYSDDDSLRGQGTQVTVS
SASHHHHHH;
DR471(DR241-DR231)
>SEQ ID NO: 176
QVQLQESGGGSVQAGGSLRLSCAASGYSNCSYDMTWYRQAPGKEREFVSA
IHSDGSTRYADSVKGRFFISQDNAKNTVYLQMNSLKPEDTAMYYCKTDPL
HCRAHGGSWYSVRANYWGQGTQVTVSSGGGSQVQLQESGGGSVQAGGSLR
LSCTASGFTFDDREMNWYRQAPGNECELVSTISSDGSTYYADSVKGRFTI
SQDNAKNTVYLQMDSVKPEDTAVYYCAADFMIAIQAPGAGCWGQGTQVTV
SSASHHHHHH;
DR472(DR241-DR232)
>SEQ ID NO: 177
QVQLQESGGGSVQAGGSLRLSCAASGYSNCSYDMTWYRQAPGKEREFVSA
IHSDGSTRYADSVKGRFFISQDNAKNTVYLQMNSLKPEDTAMYYCKTDPL
HCRAHGGSWYSVRANYWGQGTQVTVSSGGGSQVQLQESGGGSVQAGGSLR
LSCVASGYTSCMGWFRQAPGKEREAVATIYTRGRSIYYADSVKGRFTISQ
DNAKNTLYLQMNSLKPEDIAMYSCAAGGYSWSAGCEFNYWGQGTQVTVSS
ASHHHHHH;
DR473(DR241-DR233)
>SEQ ID NO: 178
QVQLQESGGGSVQAGGSLRLSCAASGYSNCSYDMTWYRQAPGKEREFVSA
IHSDGSTRYADSVKGRFFISQDNAKNTVYLQMNSLKPEDTAMYYCKTDPL
HCRAHGGSWYSVRANYWGQGTQVTVSSGGGSQVQLQESGGGSVQAGGSLR
LSCTASGFTFDDSDMGWYRQAPGNECELVSTISSDGSTYYADSVKGRFTI
SQDNAKNTVYLQMNSLKPEDTAVYYCAAEPRGYYSNYGGRRECNYWGQGT
QVTVSSASHHHHHH;
DR474(DR241-DR234)
>SEQ ID NO: 179
QVQLQESGGGSVQAGGSLRLSCAASGYSNCSYDMTWYRQAPGKEREFVSA
IHSDGSTRYADSVKGRFFISQDNAKNTVYLQMNSLKPEDTAMYYCKTDPL
HCRAHGGSWYSVRANYWGQGTQVTVSSGGGSQVQLQESGGGSVQAGGSLR
LSCVASGYTFSSYCMGWFRQAPGKEREGVAALGGGSTYYADSVKGRFTIS
QDNAKNTLYLQMNSLKPEDTAMYYCAAAWVACLEFGGSWYDLARYKHWGQ
GTQVTVSSASHHHHHH;

[0223] In some embodiments, the binding proteins described herein can include one or more anti-IL10Rα V_{H}H antibodies. When two or more anti-IL10Rα V_{H}H antibodies are present, neighboring antibodies can be conjugated to each other by way of a linker. In some embodiments, the binding proteins described herein can include one or more anti-IL2Rγ V_{H}H antibodies. When two or more anti-IL2Rγ V_{H}H antibodies are present, neighboring antibodies can be conjugated to each other by way of a linker.

[0224] In some embodiments, the binding proteins described herein can include one or more anti-IL10Rα V_{H}H antibodies and one or more anti-IL2Rγ V_{H}H antibodies. Neighboring antibodies can be conjugated to each other by way of a linker. In some embodiments, the number of anti-IL10Rα V_{H}H antibodies and the number of anti-IL2Rγ V_{H}H antibodies in a binding protein are the same. In other embodiments, the number of anti-IL10Rα V_{H}H antibodies and the number of anti-IL2Rγ V_{H}H antibodies in a binding protein are different.

[0225] In some embodiments, a binding protein described herein can be represented by the following formula:

H₂N—[[V_{H}H #1]ₐ-L_{b}-[[V_{H}H#2]_{c}]]ₓ-COOH

wherein L is a linker, a, b, c are independently selected from 0 or 1, and x is an integer between 1 and 10 (e.g., 1, 2, 3, 4, 5, 6, 7, 8, 9, or 10). In some embodiments, V_{H}H #1 and V_{H}H #2 target the same receptor or subunit thereof. In some embodiments, V_{H}H #1 and V_{H}H #2 target different receptors or subunits thereof. In some embodiments, V_{H}H #1 and V_{H}H #2 can have the same sequence. In other embodiments, V_{H}H #1 and V_{H}H #2 can have different sequences.

[0226] In some embodiments, the IL10Rα/IL2Rγ binding protein is linked to an Fc polypeptide or an Fc domain. In some embodiments, the Fc polypeptide (e.g., subunit of an Fc domain) or an Fc domain is from an IgG1, IgG2, IgG3 or IgG4. In some embodiments, the IL10Rα/IL2Rγ binding protein is at least 90 (e.g., 91%, 92%, 93%, 94%, 95%, 96%, 97%, 98%, 99%, or 100%) identical to any one of SEQ ID NOS: 49-61 or 96-179, optionally without the HHHHHH sequence(s) therein.

### A. “Forward Orientation”

[0227] In some embodiments, the bivalent IL10Rα/IL2Rγ binding molecule comprises a polypeptide of the structure:

H₂N-[anti-IL10Rα sdAb]-[L]ₓ-[anti-IL2Rγ sdAb]-[TAG]_{y}-COOH

wherein and L is a polypeptide linker of 1-50 amino acids and x=0 or 1, and TAG is a chelating peptide or a subunit of an Fc domain and y=0 or 1.

[0228] In some embodiments, a bivalent IL10Rα/IL2Rγ binding molecule of the foregoing structure comprises a polypeptide from amino to carboxy terminus:
[0229] (a) an anti-IL10Rα sdAb comprising:
   [0230] a CDR1 having at least 90% (e.g., 91%, 92%, 93%, 94%, 95%, 96%, 97%, 98%, 99%, or 100%) sequence identity, or having 0, 1, 2, or 3 amino acid changes, optionally conservative amino acid changes relative, to the sequence of any CDR1 in a row of Table 10;
   [0231] a CDR2 having at least 90% (e.g., 91%, 92%, 93%, 94%, 95%, 96%, 97%, 98%, 99%, or 100%) sequence identity, or having 0, 1, 2, or 3 amino acid changes, optionally conservative amino acid changes relative, to the sequence of any CDR2 in a row of Table 10; and
   [0232] a CDR3 having at least 90% (e.g., 91%, 92%, 93%, 94%, 95%, 96%, 97%, 98%, 99%, or 100%) sequence identity, or having 0, 1, 2, or 3 amino acid changes, optionally conservative amino acid changes relative, to the sequence of any CDR3 listed in Table 10; or
   [0233] (A) a CDR1 comprising an amino acid sequence of SEQ ID NO:1 or SEQ ID NO:264, a CDR2 comprising an amino acid sequence of SEQ ID NO:2, and a CDR3 comprising an amino acid sequence of SEQ ID NO:3; or
   [0234] (B) a CDR1 comprising an amino acid sequence of SEQ ID NO:5 or SEQ ID NO:265, a CDR2 comprising an amino acid sequence of SEQ ID NO:6, and a CDR3 comprising an amino acid sequence of SEQ ID NO:7; or
   [0235] (C) a CDR1 comprising an amino acid sequence of SEQ ID NO:9 or SEQ ID NO:266, a CDR2 comprising an amino acid sequence of SEQ ID NO:10, and a CDR3 comprising an amino acid sequence of SEQ ID NO:11; or
   [0236] (D) a CDR1 comprising an amino acid sequence of SEQ ID NO:13 or SEQ ID NO:267, a CDR2 comprising an amino acid sequence of SEQ ID NO:14, and a CDR3 comprising an amino acid sequence of SEQ ID NO:15; or
   [0237] (E) a CDR1 comprising an amino acid sequence of SEQ ID NO:17 or SEQ ID NO:268, a CDR2 comprising an amino acid sequence of SEQ ID NO:18, and a CDR3 comprising an amino acid sequence of SEQ ID NO:19; or
[0238] (F) a CDR1 comprising an amino acid sequence of SEQ ID NO:21 or SEQ ID NO:269, a CDR2 comprising an amino acid sequence of SEQ ID NO:22, and a CDR3 comprising an amino acid sequence of SEQ ID NO:23; and
[0239] (b) optionally, a polypeptide linker from 1-50 amino acids, alternatively 1-40 amino acids, alternatively 1-30 amino acids, alternatively 1-20 amino acids, alternatively 1-15 amino acids, alternatively 1-10 amino acids, alternatively 1-8 amino acids, alternatively 1-6 amino acids, alternatively 1-4 amino acids; and
[0240] (c) an anti-IL2Rγ sdAb comprising:
   [0241] a CDR1 having at least 90% (e.g., 91%, 92%, 93%, 94%, 95%, 96%, 97%, 98%, 99%, or 100%) sequence identity, or having 0, 1, 2, or 3 amino acid changes, optionally conservative amino acid changes relative, to the sequence of any CDR1 listed in Table 11 or Table 12;
   [0242] a CDR2 having at least 90% (e.g., 91%, 92%, 93%, 94%, 95%, 96%, 97%, 98%, 99%, or 100%) sequence identity, or having 0, 1, 2, or 3 amino acid changes, optionally conservative amino acid changes relative, to the sequence of any CDR2 listed in Table 11 or Table 12; and
   [0243] a CDR3 having at least 90% (e.g., 91%, 92%, 93%, 94%, 95%, 96%, 97%, 98%, 99%, or 100%) sequence identity, or having 0, 1, 2, or 3 amino acid changes, optionally conservative amino acid changes relative, to the sequence of any CDR3 listed in Table 11 or Table 12; or
   [0244] (A) a CDR1 comprising an amino acid sequence of SEQ ID NO:25 or SEQ ID NO:270, a CDR2 comprising an amino acid sequence of SEQ ID NO:26, and a CDR3 comprising an amino acid sequence of SEQ ID NO:27;
   [0245] (B) a CDR1 comprising an amino acid sequence of SEQ ID NO:29 or SEQ ID NO:271, a CDR2 comprising an amino acid sequence of SEQ ID NO:30, and a CDR3 comprising an amino acid sequence of SEQ ID NO:31;
   [0246] (C) a CDR1 comprising an amino acid sequence of SEQ ID NO:33 or SEQ ID NO:272, a CDR2 comprising an amino acid sequence of SEQ ID NO:34, and a CDR3 comprising an amino acid sequence of SEQ ID NO:35;
   [0247] (D) a CDR1 comprising an amino acid sequence of SEQ ID NO:37 or SEQ ID NO:273, a CDR2 comprising an amino acid sequence of SEQ ID NO:38, and a CDR3 comprising an amino acid sequence of SEQ ID NO:39;
   [0248] (E) a CDR1 comprising an amino acid sequence of SEQ ID NO:41 or SEQ ID NO:274, a CDR2 comprising an amino acid sequence of SEQ ID NO:42, and a CDR3 comprising an amino acid sequence of SEQ ID NO:43; or
   [0249] (F) a CDR1 comprising an amino acid sequence of SEQ ID NO:45 or SEQ ID NO:275, a CDR2 comprising an amino acid sequence of SEQ ID NO:46, and a CDR3 comprising an amino acid sequence of SEQ ID NO:47.

[0250] In some embodiments, the bivalent IL10Rα/IL2Rγ binding molecule comprises an anti-IL10Rα sdAb comprising a CDR1, a CDR2, and a CDR3 as listed in a row of Table 10 and an anti-IL2Rγ sdAb comprising a CDR1, a CDR2, and a CDR3 as listed in a row of Table 11 or Table 12.

[0251] In some embodiments, the anti-IL10Rα sdAb of the bivalent IL10Rα/IL2Rγ binding molecule comprises a sequence having at least 90% (e.g., 91%, 92%, 93%, 94%, 95%, 96%, 97%, 98%, 99%, or 100%) sequence identity to a sequence of any one the of anti-IL10Rα sdAbs provided in Table 13. In some embodiments, the anti-IL2Rγ sdAb of the bivalent IL10Rα/IL2Rγ binding molecule comprises a sequence having at least 90% (e.g., 91%, 92%, 93%, 94%, 95%, 96%, 97%, 98%, 99%, or 100%) sequence identity to a sequence of any one the of anti-IL2Rγ sdAbs provided in Table 14 or Table 15.

[0252] In some embodiments, the subunit of the Fc domain is from an IgG1, IgG2, IgG3 or IgG4. In some embodiments, the subunit of the Fc domain comprises one or more amino acid substitutions to reduce effector function, for example, the subunit of the Fc domain comprises a set of amino acid substitutions selected from the group consisting of: (a) L234A/L235A/P329A (“LALAPA”); L234A/L235A/P329G (“LALAPG”); L234A/L235E/G237A/A330S/P331S (“AEASS”); E233P/L234V/L235A/AG237 (PVAdelG); and L234F/L235E/P331S (“FES”). In some embodiments, the subunit of the Fc domain is modified for multimerization. In some embodiments the subunit of the Fc domain comprises an amino acid substitution at position C220 (EU numbering) of the upper hinge domain to eliminate the sulfhydryl side chain. In some embodiments, the substitution at position C220 is C220S (EU numbering) substitution. In some embodiments the subunit of the Fc domain comprises amino acid substitutions in the Fc domain at positions M428 and/or N434 (EU numbering). In some embodiments the amino acid substitutions at positions M428 and/or N434 are M428L and/or N434S. In some embodiments the subunit of the Fc domain comprises amino acid deletions in the Fc domain at positions G446 and/or K447 (EU numbering).

### B. “Reverse Orientation”

[0253] In some embodiments, the bivalent IL10Rα/IL2Rγ binding molecule comprises a polypeptide of the structure:

H₂N-[anti-IL2Rγ sdAb]-[L]ₓ-[anti-IL10Rα sdAb]-[TAG]_{y}-COOH

wherein and L is a polypeptide linker of 1-50 amino acids and x=0 or 1, and TAG is a chelating peptide or a subunit of an Fc domain and y=0 or 1.

[0254] In some embodiments, a bivalent IL10Rα/IL2Rγ binding molecule of the foregoing structure comprises a polypeptide from amino to carboxy terminus:
[0255] (a) an anti-IL2Rγ sdAb comprising:
   [0256] a CDR1 having at least 90% (e.g., 91%, 92%, 93%, 94%, 95%, 96%, 97%, 98%, 99%, or 100%) sequence identity, or having 0, 1, 2, or 3 amino acid changes, optionally conservative amino acid changes relative, to the sequence of any CDR1 listed in Table 11 or Table 12;
   [0257] a CDR2 having at least 90% (e.g., 91%, 92%, 93%, 94%, 95%, 96%, 97%, 98%, 99%, or 100%) sequence identity, or having 0, 1, 2, or 3 amino acid changes, optionally conservative amino acid changes relative, to the sequence of any CDR2 listed in Table 11 or Table 12; and
   [0258] a CDR3 having at least 90% (e.g., 91%, 92%, 93%, 94%, 95%, 96%, 97%, 98%, 99%, or 100%) sequence identity, or having 0, 1, 2, or 3 amino acid changes, optionally conservative amino acid changes relative, to the sequence of any CDR3 listed in Table 11 or Table 12; or
   [0259] (A) a CDR1 comprising an amino acid sequence of SEQ ID NO:25 or SEQ ID NO:270, a CDR2 comprising an amino acid sequence of SEQ ID NO:26, and a CDR3 comprising an amino acid sequence of SEQ ID NO:27;
   [0260] (B) a CDR1 comprising an amino acid sequence of SEQ ID NO:29 or SEQ ID NO:271, a CDR2 comprising an amino acid sequence of SEQ ID NO:30, and a CDR3 comprising an amino acid sequence of SEQ ID NO:31;
   [0261] (C) a CDR1 comprising an amino acid sequence of SEQ ID NO:33 or SEQ ID NO:272, a CDR2 comprising an amino acid sequence of SEQ ID NO:34, and a CDR3 comprising an amino acid sequence of SEQ ID NO:35;
   [0262] (D) a CDR1 comprising an amino acid sequence of SEQ ID NO:37 or SEQ ID NO:273, a CDR2 comprising an amino acid sequence of SEQ ID NO:38, and a CDR3 comprising an amino acid sequence of SEQ ID NO:39;
   [0263] (E) a CDR1 comprising an amino acid sequence of SEQ ID NO:41 or SEQ ID NO:274, a CDR2 comprising an amino acid sequence of SEQ ID NO:42, and a CDR3 comprising an amino acid sequence of SEQ ID NO:43; or
   [0264] (F) a CDR1 comprising an amino acid sequence of SEQ ID NO:45 or SEQ ID NO:275, a CDR2 comprising an amino acid sequence of SEQ ID NO:46, and a CDR3 comprising an amino acid sequence of SEQ ID NO:47; and
[0265] (b) optionally, a polypeptide linker from 1-50 amino acids, alternatively 1-40 amino acids, alternatively 1-30 amino acids, alternatively 1-20 amino acids, alternatively 1-15 amino acids, alternatively 1-10 amino acids, alternatively 1-8 amino acids, alternatively 1-6 amino acids, alternatively 1-4 amino acids; and
[0266] (c) an anti-IL10Rα sdAb comprising:
[0267] a. a CDR1 having at least 90% (e.g., 91%, 92%, 93%, 94%, 95%, 96%, 97%, 98%, 99%, or 100%) sequence identity, or having 0, 1, 2, or 3 amino acid changes, optionally conservative amino acid changes relative, to the sequence of any CDR1 in a row of Table 10.
[0268] b. a CDR2 having at least 90% (e.g., 91%, 92%, 93%, 94%, 95%, 96%, 97%, 98%, 99%, or 100%) sequence identity, or having 0, 1, 2, or 3 amino acid changes, optionally conservative amino acid changes relative, to the sequence of any CDR2 in a row of Table 10; and
[0269] c. a CDR3 having at least 90% (e.g., 91%, 92%, 93%, 94%, 95%, 96%, 97%, 98%, 99%, or 100%) sequence identity, or having 0, 1, 2, or 3 amino acid changes, optionally conservative amino acid changes relative, to the sequence of any CDR3 listed in Table 10; or
[0270] d. (A) a CDR1 comprising an amino acid sequence of SEQ ID NO:1 or SEQ ID NO:264, a CDR2 comprising an amino acid sequence of SEQ ID NO:2, and a CDR3 comprising an amino acid sequence of SEQ ID NO:3; or
[0271] e. (B) a CDR1 comprising an amino acid sequence of SEQ ID NO:5 or SEQ ID NO:265, a CDR2 comprising an amino acid sequence of SEQ ID NO:6, and a CDR3 comprising an amino acid sequence of SEQ ID NO:7; or
[0272] f. (C) a CDR1 comprising an amino acid sequence of SEQ ID NO:9 or SEQ ID NO:266, a CDR2 comprising an amino acid sequence of SEQ ID NO:10, and a CDR3 comprising an amino acid sequence of SEQ ID NO:11; or
[0273] g. (D) a CDR1 comprising an amino acid sequence of SEQ ID NO:13 or SEQ ID NO:267, a CDR2 comprising an amino acid sequence of SEQ ID NO:14, and a CDR3 comprising an amino acid sequence of SEQ ID NO:15; or
[0274] h. (E) a CDR1 comprising an amino acid sequence of SEQ ID NO:17 or SEQ ID NO:268, a CDR2 comprising an amino acid sequence of SEQ ID NO:18, and a CDR3 comprising an amino acid sequence of SEQ ID NO:19; or
[0275] i. (F) a CDR1 comprising an amino acid sequence of SEQ ID NO:21 or SEQ ID NO:269, a CDR2 comprising an amino acid sequence of SEQ ID NO:22, and a CDR3 comprising an amino acid sequence of SEQ ID NO:23.

[0276] In some embodiments, the anti-IL2Rγ sdAb comprises a sequence having at least 90% (e.g., 91%, 92%, 93%, 94%, 95%, 96%, 97%, 98%, 99%, or 100%) sequence identity to a sequence listed in a row of Table 14 or Table 15. In certain embodiments, the anti-IL10Rα sdAb comprises a sequence having at least 90% sequence identity to a sequence of any one of listed in a row of Table 13.

[0277] In some embodiments, the subunit of the Fc domain is from an IgG1, IgG2, IgG3 or IgG4. In some embodiments, the subunit of the Fc domain comprises one or more amino acid substitutions to reduce effector function, for example, the subunit of the Fc domain comprises a set of amino acid substitutions selected from the group consisting of: (a) L234A/L235A/P329A (“LALAPA”); L234A/L235A/P329G (“LALAPG”); L234A/L235E/G237A/A330S/P331S (“AEASS”); E233P/L234V/L235A/AG237 (PVAdelG); and L234F/L235E/P331S (“FES”). In some embodiments, the subunit of the Fc domain is modified for multimerization. In some embodiments the subunit of the Fc domain comprises an amino acid substitution at position C220 (EU numbering) of the upper hinge domain to eliminate the sulfhydryl side chain. In some embodiments, the substitution at position C220 is C220S (EU numbering) substitution. In some embodiments, the subunit of the Fc domain comprises amino acid substitutions in the Fc domain at positions M428 and/or N434 (EU numbering). In some embodiments, the amino acid substitutions at positions M428 and/or N434 are M428L and/or N434S. In some embodiments, the subunit of the Fc domain comprises amino acid deletions in the Fc domain at positions G446 and/or K447 (EU numbering).

### IV. Single-Domain Antibody and V_{H}H

[0278] A single-domain antibody (sdAb) is an antibody containing a single monomeric variable antibody domain. Like a full-length antibody, it is able to bind selectively to a specific antigen. The complementary determining regions (CDRs) of sdAbs are within a single-domain polypeptide. Single-domain antibodies can be engineered from heavy-chain antibodies found in camelids, which are referred to as V_{H}Hs. Cartilaginous fishes also have heavy-chain antibodies (IgNAR, “immunoglobulin new antigen receptor”), from which single-domain antibodies referred to as VNARS can be obtained. The dimeric variable domains from common immunoglobulin G (IgG) from humans or mice can also be split into monomers to make sdAbs. Although most research into sdAbs is currently based on heavy chain variable domains, sdAbs derived from light chains have also been shown to bind specifically to target, see, e.g., Moller et al., J Biol Chem. 285(49):38348-38361, 2010. In some embodiments, a sdAb is composed of a single monomeric light chain variable antibody domain.

[0279] A sdAb can be a heavy chain antibody (V_{H}H). A V_{H}H is a type of sdAb that has a single monomeric heavy chain variable antibody domain. Similar to a traditional antibody, a V_{H}H is able to bind selectively to a specific antigen. A binding protein described herein can include two V_{H}Hs (e.g., V_{H}H²) joined together by a linker (e.g., a peptide linker). The binding protein can be a bispecific V_{H}H² that includes a first V_{H}H binding to a first receptor or domain or subunit thereof and a second V_{H}H binding to a second receptor or domain or subunit thereof, in which the two V_{H}Hs are joined by a linker.

[0280] An exemplary V_{H}H has a molecular weight of approximately 12-15 kDa which is much smaller than traditional mammalian antibodies (150-160 kDa) composed of two heavy chains and two light chains. V_{H}Hs can be found in or produced from Camelidae mammals (e.g., camels, llamas, dromedary, alpaca, and guanaco) which are naturally devoid of light chains. Descriptions of sdAbs and V_{H}HS can be found in, e.g., De Greve et al., Curr Opin Biotechnol. 61:96-101, 2019; Ciccarese, et al., Front Genet. 10:997, 2019; Chanier and Chames, Antibodies (Basel) 8(1), 2019; and De Vlieger et al., Antibodies (Basel) 8(1), 2018.

[0281] To prepare a binding protein that is a bispecific V_{H}H², in some embodiments, the two V_{H}Hs can be synthesized separately, then joined together by a linker. Alternatively, the bispecific V_{H}H² can be synthesized as a fusion protein. V_{H}Hs having different binding activities and receptor targets can be paired to make a bispecific V_{H}H². The binding proteins can be screened for signal transduction on cells carrying one or both relevant receptors.

### V. Linkers

[0282] As previously described, the binding domains of the dimeric binding proteins of the present disclosure may be joined contiguously (e.g, the C-terminal amino acid of the first V_{H}H in the binding protein to the N-terminal amino acid of the second V_{H}H in the binding protein) or the binding domains of the binding protein may optionally be joined via a linker. A linker is a linkage between two elements, e.g., protein domains. In a bispecific V_{H}H² binding protein described herein, a linker is a linkage between the two V_{H}Hs in the binding protein. A linker can be a covalent bond or a peptide linker. In some embodiments, the two V_{H}Hs in a binding protein are joined directly (i.e., via a covalent bond). The length of the linker between two V_{H}Hs in a binding protein can be used to modulate the proximity of the two V_{H}Hs of the binding protein. By varying the length of the linker, the overall size and length of the binding protein can be tailored to bind to specific cell receptors or domains or subunits thereof. For example, if the binding protein is designed to bind to two receptors or domains or subunits thereof that are located close to each other on the same cell, then a short linker can be used. In another example, if the binding protein is designed to bind to two receptors or domains or subunits there of that are located on two different cells, then a long linker can be used.

[0283] In some embodiments, the linker is a peptide linker. A peptide linker can include between 1 and 50 amino acids (e.g., between 2 and 50, between 5 and 50, between 10 and 50, between 15 and 50, between 20 and 50, between 25 and 50, between 30 and 50, between 35 and 50, between 40 and 50, between 45 and 50, between 2 and 45, between 2 and 40, between 2 and 35, between 2 and 30, between 2 and 25, between 2 and 20, between 2 and 15, between 2 and 10, between 2 and 5 amino acids). A linker can also be a chemical linker, such as a synthetic polymer, e.g., a polyethylene glycol (PEG) polymer.

[0284] In some embodiments, a linker joins the C-terminus of the first V_{H}H in the binding protein to the N-terminus of the second V_{H}H in the binding protein. In other embodiments, a linker joins the C-terminus of the second V_{H}H in the binding protein to the N-terminus of the first V_{H}H in the binding protein.

[0285] Suitable peptide linkers are known in the art, and include, for example, peptide linkers containing flexible amino acid residues such as glycine and serine. In certain embodiments, a peptide linker can contain motifs, e.g., multiple or repeating motifs, of GS, GGS, GGGS (SEQ ID NO:62), GGGGS (SEQ ID NO:63), GGGGGS (SEQ ID NO:64), GGSG (SEQ ID NO:65), or SGGG (SEQ ID NO:66). In certain embodiments, a peptide linker can contain 2 to 12 amino acids including motifs of GS, e.g., GS, GSGS (SEQ ID NO:67), GSGSGS (SEQ ID NO:68), GSGSGSGS (SEQ ID NO:69), GSGSGSGSGS (SEQ ID NO:70), or GSGSGSGSGSGS (SEQ ID NO:71). In certain other embodiments, a peptide linker can contain 3 to 12 amino acids including motifs of GGS, e.g., GGS, GGSGGS (SEQ ID NO:72), GGSGGSGGS (SEQ ID NO:73), and GGSGGSGGSGGS (SEQ ID NO:74). In yet other embodiments, a peptide linker can contain 4 to 20 amino acids including motifs of GGSG (SEQ ID NO:65), e.g., GGSGGGSG (SEQ ID NO:75), GGSGGGSGGGSG (SEQ ID NO:76), GGSGGGSGGGSGGGSG (SEQ ID NO:77), or GGSGGGSGGGSGGGSGGGSG (SEQ ID NO:78). In other embodiments, a peptide linker can contain motifs of GGGGS (SEQ ID NO:63), e.g., GGGGSGGGGS (SEQ ID NO:79) or GGGGSGGGGSGGGGS (SEQ ID NO:80).

### Modulation of Activity of Receptor Binding Molecules

[0286] In some embodiments, such as to achieve partial agonism or selective activation of particular cell types, the design of the IL10Rα/IL2Rγ binding molecules of the present disclosure may be modulated by structural variations in the design of the receptor binding molecule. This variation in activity may be employed to modulate the binding and activity of the IL10Rα/IL2Rγ binding molecule, for to optimize the activity of the IL10Rα/IL2Rγ binding molecule to achieve partial agonism, selective cell type activation or to provide molecules having increased or decreased binding relative to the cognate ligand for each of the IL10Rα sdAb and IL2Rγ sdAb for their respective receptor subunits. The ability to modulate activity of the IL10Rα/IL2Rγ binding molecules of the present disclosure provides substantial benefits in multiple therapeutic applications. The IL10Rα/IL2Rγ binding molecules of the present disclosure can trigger different levels of downstream signaling in different cell types. For example, by varying the length of the linker between the IL10Rα sdAb antibody and the IL2Rg sdAb antibody in the IL10Rα/IL2Rγ binding molecule, the IL10Rα/IL2Rγ binding molecules provides a higher level of downstream signaling in desired cell types compared to undesired cell types. In other embodiments, different IL10Rα sdAb antibodies with different binding affinities and different IL IL2Rγ sdAb antibodies with different binding affinities can be used to tune the activity of IL10R binding molecule. Further, when the IL10Rα/I IL2Rγ binding molecule is provided as a single a polypeptide, the orientation of the two antibodies in the polypeptide can also be changed to make change the properties of the molecule.

[0287] In some embodiments, the IL10Rα/IL2Rγ binding molecules of the present disclosure result in level of downstream signaling in T cells (e.g., CD8⁺ T cells) having an Eₘₐₓ on T cells that is at least 5-fold greater, alternatively 10-fold greater, alternatively 100-fold greater, alternatively at least 1000-fold greater that the Eₘₐₓ of signaling in monocytes.

[0288] In one embodiment, the present disclosure provides an IL10Rα/IL2Rγ binding molecule that preferentially activates T cells, in particular CD8⁺ T cells, relative to monocytes. In some embodiments, the IL10Rα/IL2Rγ binding molecules of the present disclosure result in level of downstream signaling in T cells (e.g., CD8⁺ T cells) having an Eₘₐₓ on T cells that is at least 5-fold greater, alternatively 10-fold greater, alternatively 100-fold greater, alternatively at least 1000-fold greater that the Eₘₐₓ of signaling in monocytes.

[0289] In some embodiments, it is desired to provide an the IL10Rα/IL2Rγ binding protein has a reduced Eₘₐₓ compared to the Eₘₐₓ caused by IL10, the cognate ligand for the IL10 receptor (i.e. an IL10R binding molecule that is a IL10 partial agonist) with respect to a given cell type. In some embodiments, the IL10Ra/IL2Rg binding protein described herein has at least 1% (e.g., between 1% and 100%, between 10% and 100%, between 20% and 100%, between 30% and 100%, between 40% and 100%, between 50% and 100%, between 60% and 100%, between 70% and 100%, between 80% and 100%, between 90% and 100%, between 10% and 90%, between 10% and 80%, between 10% and 70%, between 10% and 60%, between 10% and 50%, between 1% and 40%, between 1% and 30%, between 1% and 20%, or between 1% and 10%) of the Eₘₐₓ associated with wildtype hIL10.

### Modulation of Activity by Modulation of Linker Length

[0290] In some embodiments, for example by varying the linker length between binding domains of the binding molecule can be employed to modulate the activity of the dimeric binding proteins, both with respect to a particular activity in a given cell types and between cell types. In some embodiments, for example by varying the linker length, an IL10Rα/IL2Rγ binding molecule can cause a higher level of downstream signaling in T cells (e.g., CD8⁺ T cells) compared to the level of downstream signaling in monocytes. The ability to modulate the activity of the IL10Rα/IL2Rγ binding molecule provides a molecule with a higher level of downstream signaling in T cells (e.g., CD8⁺ T cells) compared to the level of downstream signaling in monocytes.

[0291] The ability to modulate the activity of the dimeric binding molecule provides a molecule with a higher level of downstream signaling in one particular cell type (e.g., CD8⁺ T cells) compared to the level of downstream in another cell type (e.g. monocytes). A series of representative IL10Ra/IL2Rg dimeric binding molecules were constructed to evaluate and demonstrate the effect of linker length with respect to various biological activities modulated in T cells and monocytes. The results of these studies are presented in Tables 20-29 below which provide details regarding the particular binding protein test article components, linker amino acid sequence and length, the concentrations of the test article evaluated, the cell type used and the resulting biological response measured. Each of these molecules was produced recombinantly and purified in substantial accordance with the examples provided herein. Parameters which were evaluated include pSTAT3 induction in CD8⁺ T cells (Table 20), on pSTAT3 Induction of on CD4 T cells (Table 21) pSTAT3 Induction of in monocytes (Table 22), IFNγ secretion in CD8⁺ T cells (Table 23), Granzyme A secretion in CD8⁺ T cells (Table 24), Granzyme B secretion in CD8⁺ T cells (Table 25), IL9 secretion in CD8⁺ T cells (Table 26), IL-1β secretion in LPS treated monocytes (Table 27), IL6 secretion in LPS treated monocytes (Table 28), and TNF-α secretion in LPS treated monocytes (Table 29). These data demonstrate the ability to modulate the function of the IL10Ra/IL2Rg dimeric binding molecules within a given cell type or to bias function with respect to one cell type or the other by variation of the linker between the binding domains.

Modulation Activity by Modulation of sdAb Binding Affinity(ies):

[0292] In some embodiments, the activity and/or specificity of the bivalent IL10Rα/IL2Rγ binding molecule of the present disclosure may be modulated by the respective binding affinities of the sdAbs for their respective receptor subunits. It will be appreciated by one of skill in the art that the binding of the first sdAb of the bivalent IL10Rα/IL2Rγ binding molecule to the first receptor subunit ECD on the cell surface will enhance the probability of a binding interaction between the second sdAb of the bivalent IL10Rα/IL2Rγ binding molecule with the ECD of the second receptor subunit. This cooperative binding effect may result in a bivalent IL10Rα/IL2Rγ binding molecule which has a very high affinity for the receptor and a very slow “off rate” from the receptor [. Typical V_{H}H single domain antibodies have an affinity for their targets of from about 10⁻⁵M to about 10⁻¹⁰M. In those instances such slow off-rate kinetics are desirable in the bivalent IL10Rα/IL2Rγ binding molecule, the selection of sdAbs having high affinities (about 10⁻⁷M to about 10⁻¹⁰M) for incorporation into the bivalent IL10Ra/IL2Rγ binding molecule are favored.

[0293] Naturally occurring cytokine ligands typically do not exhibit a similar affinity for each subunit of a heterodimeric receptor. Consequently, in designing a bivalent IL10Rα/IL2Rγ binding molecule, selection of sdAbs for the first and second IL10Rα/IL2Rγ receptor subunit have an affinity similar to (e.g., having an affinity about 10 fold, alternatively about 20 fold, or alternatively about 50 fold higher or lower than) the cognate ligand for the respective receptor subunit may be used.

[0294] In some embodiments, the bivalent IL10Rα/IL2Rγ binding molecules of the present disclosure are partial agonists of the IL10Rα/IL2Rγ receptor. As such, the activity of the bivalent binding molecule may be modulated by selecting sdAb which have greater or lesser affinity for either one or both of the IL10Rα/IL2Rγ receptor subunits. As some heterodimeric cytokine receptors are comprised of a “proprietary subunit” (i.e., a subunit which is not naturally a subunit of another multimeric receptor) and a second “common” subunit (such as CD132) which is a shared component of multiple cytokine receptors), selectivity for the formation of such receptor may be enhanced by employing first sdAb which has a higher affinity for the proprietary receptor subunit and second sdAB which exhibits a lower affinity for the common receptor subunit. Additionally, the common receptor subunit may be expressed on a wider variety of cell types than the proprietary receptor subunit. In some embodiments wherein the receptor is a heterodimeric receptor comprising a proprietary subunit and a common subunit, the first sdAb of the bivalent IL10Rα/IL2Rγ binding molecule exhibits a significantly greater (more than 10 times greater, alternatively more than 100 times greater, alternatively more than 1000 times greater) affinity for the proprietary receptor than the second sdAb of the bivalent IL10Rα/IL2Rγ binding molecule for the common receptor subunit. In one embodiment, the present disclosure provides a bivalent IL10Rα/IL2Rγ binding molecule wherein the affinity of the anti-IL10Rα sdAb of has an affinity of more than 10 times greater, alternatively more than 100 times greater, alternatively more than 1000 times greater) affinity anti-IL2Rγ sdAb common receptor subunit.

[0295] In one embodiment, the present disclosure provides an IL10Rα/IL2Rγ binding molecule wherein the affinity of the IL10Rα sdAb has a higher affinity for the extracellular domain of IL10Rα than the affinity of the IL2Rg sdAb for the extracellular domain of IL2Rγ. In some embodiments, the present disclosure provides a IL10Rα molecule, wherein the affinity of the IL10Rα sdAb has an affinity for the extracellular domain of IL10Rα of from about 10⁻⁸ to about 10⁻¹⁰ M, alternatively from about 10⁻⁹ to about 10⁻¹⁰M, or alternatively about 10⁻¹⁰ M and the IL2Rγ sdAb an affinity for the extracellular domain of IL2Rγ of from about 10⁻⁶ to about 10⁻⁹ M, alternatively from about 10⁻⁷ to about 10⁻⁹M, alternatively from about 10⁻⁷ to about 10⁻⁸M, alternatively about 10⁻⁹M, alternatively about 10⁻⁸M. In some embodiments, the present disclosure provides a IL10Rα/IL2Rγ binding molecule, wherein the affinity of the IL10Rα sdAb has an affinity for the extracellular domain of IL10Rα of from about 10⁻⁸ to about 10⁻¹⁰ M, alternatively from about 10⁻⁹ to about 10⁻¹⁰M, or alternatively about 10⁻¹⁰ M and the IL2Rg sdAb an affinity for the extracellular domain of IL2Rγ of from about 10⁻⁶ to about 10⁻⁹ M, alternatively from about 10⁻⁷ to about 10⁻⁹M, alternatively from about 10⁻⁷ to about 10⁻⁸M, alternatively about 10⁻⁹M, alternatively about 10⁻⁸M, and the affinity of the IL10Rα sdAb for ECD of IL10Rα is more than 2 fold higher, alternatively more than 5 fold higher, alternatively more than 10 fold higher, alternatively more than 20 fold higher, alternatively more than 40 fold higher, alternatively more than 50 fold higher, alternatively more than 60 fold higher, alternatively more than 70 fold higher, alternatively more than 80 fold higher, alternatively more than 90 fold higher, alternatively more than 100 fold higher, alternatively more than 150 fold higher, alternatively more than 200 fold higher or alternatively more than 500 fold higher than the affinity of the IL2Rγ sdAb for ECD of IL2Rγ.

### VI. Modifications to Extend Duration of Action In Vivo

[0296] The binding proteins described herein can be modified to provide for an extended lifetime in vivo and/or extended duration of action in a subject. In some embodiments, the binding protein can be conjugated to carrier molecules to provide desired pharmacological properties such as an extended half-life. In some embodiments, the binding protein can be covalently linked to the Fc domain of IgG, albumin, or other molecules to extend its half-life, e.g., by pegylation, glycosylation, and the like as known in the art.

[0297] In some embodiments, the binding protein is conjugated to an Fc polypeptide or an Fc domain (a dimer of two Fc polypeptides), optionally comprising an intervening linker. Fc fusion conjugates have been shown to increase the systemic half-life of biopharmaceuticals, and thus the biopharmaceutical product can require less frequent administration. Fc binds to the neonatal Fc receptor (FcRn) in endothelial cells that line the blood vessels, and, upon binding, the Fc fusion molecule is protected from degradation and re-released into the circulation, keeping the molecule in circulation longer. This Fc binding is believed to be the mechanism by which endogenous IgG retains its long plasma half-life. More recent Fc-fusion technology links a single copy of a biopharmaceutical to the Fc region of an antibody to optimize the pharmacokinetic and pharmacodynamic properties of the biopharmaceutical as compared to traditional Fc-fusion conjugates. The Fc polypeptide or Fc domain useful in the preparation of Fc fusions can be a naturally occurring or synthetic polypeptide that is homologous to an IgG C-terminal domain produced by digestion of IgG with papain. IgG Fc has a molecular weight of approximately 50 kDa. The binding protein described herein can be conjugated to the entire Fc polypeptide or Fc domain, or a smaller portion that retains the ability to extend the circulating half-life of a chimeric polypeptide of which it is a part. In addition, full-length or fragmented Fc polypeptide can be variants of the wild-type molecule. In a typical presentation, each Fc polypeptide in an Fc domain can carry a heterologous polypeptide; the two heterologous polypeptides in the Fc domain being the same or different (e.g., one fused to an anti-IL10Rα V_{H}H antibody and the other fused to an anti-IL2Rγ V_{H}H antibody or one or both heterologous polypeptides linked to a anti-IL10Rα V_{H}H antibody/anti-IL2Rγ V_{H}H antibody dimer polypeptide). As indicated, the linkage of the IL10Rα/IL2Rγ bivalent binding molecule to the Fc subunit may incorporate a linker molecule as described below between the bivalent sdAb and Fc subunit. In some embodiments, the IL10Rα/IL2Rγ bivalent binding molecule is expressed as a fusion protein with the Fc domain incorporating an amino acid sequence of a hinge region of an IgG antibody. The Fc domains engineered in accordance with the foregoing may be derived from IgG1, IgG2, IgG3 and IgG4 mammalian IgG species. In some embodiments, the Fc domains may be derived from human IgG1, IgG2, IgG3 and IgG4 IgG species. In some embodiments, the hinge region is the hinge region of an IgG1. In one particular embodiment, the IL10Rα/IL2Rγ bivalent binding is linked to an Fc domain using an human IgG1 hinge domain.

[0298] In some embodiments, a bivalent binding molecule of the present disclosure may be conjugated to one (as illustrated in FIGS. 1C and 1D) or both domains of the Fc (as illustrated in FIGS. 1C and 1D). In one embodiment, the Fc domain is an Fc domain that is derived from the human IgG4 IgG4 heavy constant region (UniProt Reference P01861). The use of hIgG4 as the source of the Fc provides advantages such very low FcγR binding thereby reducing the necessity of mutations immunogenicity or effector function. In some embodiments, when hIgG4 is employed as the source of the Fc domain, the hIgG4 Fc may comprise the amino acid substitution S228P (EU numbering) which is useful to stabilize the Fc dimer. Additionally, or alternatively, the hIgG4 Fc may comprise the amino acid substitution N297G (EU numbering) which reduces FcγR binding. Additionally, or alternatively, the hIgG4 Fc may comprise the a deletion of the C-terminal lysine residue (K447del) (EU numbering) which reduces FcγR binding.

[0299] In one embodiment, the present disclosure provides a homodimeric binding protein comprised of two of the same IL10Rα/IL2Rg dimeric binding molecules (H1, DR240-G3S-DR231) each attached via an AS linker to a domain of an hIgG4 Fc (comprising the hIgG4 hinge, CH2 and CH3 domains) containing the amino acid substitutions S228P and N297G and the deletion of K447 and having the amino acid sequence:

(SEQ ID NO: 556)
QVQLQESGGGSVQAGGSLRLSCGASGYTYSSYCMGWFRQVPGKEREGVAV
IDSDGSTSYADSVKGRFTISKDNGKNTLYLQMNSLKPEDTAMYYCAADLG
HYRPPCGVLYLGMDYWGKGTQVTVSSGGGSQVQLQESGGGSVQAGGSLRL
SCTASGFTFDDREMNWYRQAPGNECELVSTISSDGSTYYADSVKGRFTIS
QDNAKNTVYLQMDSVKPEDTAVYYCAADFMIAIQAPGAGCWGQGTQVTVS
SASRVESKYGPPCPPCPAPEFLGGPSVFLFPPKPKDTLMISRTPEVTCVV
VDVSQEDPEVQFNWYVDGVEVHNAKTKPREEQFGSTYRVVSVLTVLHQDW
LNGKEYKCKVSNKGLPSSIEKTISKAKGQPREPQVYTLPPSQEEMTKNQV
SLTCLVKGFYPSDIAVEWESNGQPENNYKTTPPVLDSDGSFFLYSRLTVD
KSRWQEGNVFSCSVMHEALHNHYTQKSLSLSLG

which is referred to herein as DR992. A nucleic acid sequence encoding DR992 has the DNA sequence

(SEQ ID NO: 557)
CAAGTGCAGCTGCAAGAGAGCGGAGGAGGAAGCGTCCAAGCCGGAGGCTC
TCTGAGGCTGAGCTGTGGAGCCAGCGGCTACACTTACAGCAGCTACTGTA
TGGGCTGGTTTAGGCAAGTGCCCGGCAAGGAGAGAGAGGGCGTGGCCGTG
ATCGATTCCGATGGCAGCACAAGCTACGCTGACAGCGTGAAGGGAAGGTT
CACAATCAGCAAGGACAACGGCAAGAACACACTCTATCTGCAGATGAACA
GCCTCAAGCCAGAGGACACAGCCATGTACTACTGCGCCGCTGATCTGGGC
CACTATAGGCCTCCTTGTGGCGTGCTGTATCTGGGCATGGATTACTGGGG
CAAGGGCACACAAGTGACAGTCTCGAGCGGCGGAGGATCCCAAGTGCAGC
TGCAAGAGAGCGGAGGAGGAAGCGTGCAAGCCGGCGGATCTCTGAGACTC
AGCTGTACTGCCTCCGGCTTCACATTCGACGATAGGGAGATGAACTGGTA
TAGGCAAGCCCCCGGCAATGAGTGCGAGCTGGTGAGCACAATCTCCAGCG
ATGGCAGCACTTACTACGCCGATAGCGTGAAGGGAAGGTTCACTATCTCC
CAAGATAACGCCAAGAACACAGTCTATCTGCAGATGGACTCCGTCAAGCC
AGAGGATACTGCCGTGTACTACTGCGCCGCCGACTTCATGATCGCCATCC
AAGCCCCCGGCGCTGGCTGTTGGGGACAAGGCACTCAAGTGACAGTCTCG
TCTGCTAGCAGAGTGGAATCTAAGTACGGGCCCCCTTGTCCTCCATGTCC
TGCTCCAGAGTTTCTCGGCGGACCCTCCGTGTTCCTGTTTCCTCCAAAGC
CTAAGGACACCCTGATGATCTCTCGGACCCCTGAAGTGACCTGCGTGGTG
GTGGATGTGTCCCAAGAAGATCCCGAGGTGCAGTTCAATTGGTACGTGGA
CGGCGTGGAAGTGCACAACGCCAAGACCAAGCCTAGAGAGGAACAGTTCG
GCTCCACCTACAGAGTGGTGTCCGTGCTGACAGTGCTGCACCAGGATTGG
CTGAACGGCAAAGAGTACAAGTGCAAGGTGTCCAACAAGGGCCTGCCTTC
CAGCATCGAAAAGACCATCTCCAAGGCCAAGGGCCAGCCTAGGGAACCCC
AGGTTTACACCCTGCCTCCAAGCCAAGAGGAAATGACCAAGAACCAGGTG
TCCCTGACCTGCCTGGTCAAGGGCTTCTACCCTTCCGATATCGCCGTGGA
ATGGGAGAGCAATGGCCAGCCTGAGAACAACTACAAGACCACACCTCCTG
TGCTGGACTCCGACGGCTCCTTCTTTCTGTACTCTCGGCTGACCGTGGAC
AAGAGCAGATGGCAAGAGGGCAACGTGTTCTCCTGCTCCGTGATGCACGA
GGCCCTGCACAATCACTACACCCAGAAGTCCCTGTCTCTGTCCCTGGGA

[0300] In another embodiment, the present disclosure provides a homodimeric binding protein comprised of two of the same IL10Ra/IL2Rg dimeric binding molecules (A2, DR229-G3S-DR239) each attached to a domain of an IgG4 Fc containing the S228P amino acid substitution having the amino acid sequence:

(SEQ ID No 558)
QVQLQESGGGLVQPGGSLRLSCTASGFSFSSYPMTWARQAPGKGLEWVST
IASDGGSTAYAASVEGRFTISRDNAKSTLYLQLNSLKTEDTAMYYCTKGY
GDGTPAPGQGTQVTVSSGGGSQVQLQESGGGSVQAGGSLRLSCTVSGYTY
SSNCMGWFRQAPGKEREGVATIYTGGGNTYYADSVKGRFTISQDNAKNTV
YLQMNNLKPEDTAMYYCAAEPLSRVYGGSCPTPTFDYWGQGTQVTVSSAS
RVESKYGPPCPPCPAPEFLGGPSVFLFPPKPKDTLMISRTPEVTCVVVDV
SQEDPEVQFNWYVDGVEVHNAKTKPREEQFGSTYRVVSVLTVLHQDWLNG
KEYKCKVSNKGLPSSIEKTISKAKGQPREPQVYTLPPSQEEMTKNQVSLT
CLVKGFYPSDIAVEWESNGQPENNYKTTPPVLDSDGSFFLYSRLTVDKSR
WQEGNVFSCSVMHEALHNHYTQKSLSLSLG

which is referred to herein as DR995. A nucleic acid sequence encoding DR995 has the DNA sequence

(SEQ ID NO: 559)
CAAGTGCAGCTGCAAGAGAGCGGAGGAGGACTGGTCCAGCCCGGCGGCTC
TCTGAGGCTGAGCTGCACTGCTTCCGGCTTCAGCTTCAGCAGCTACCCTA
TGACATGGGCTAGGCAAGCCCCCGGCAAAGGACTGGAATGGGTGAGCACT
ATTGCCAGCGATGGAGGCAGCACAGCCTACGCTGCCAGCGTGGAGGGAAG
GTTCACAATCTCTAGGGACAATGCCAAGAGCACACTGTATCTGCAGCTGA
ACTCTCTGAAGACAGAGGACACTGCCATGTACTACTGCACTAAGGGCTAC
GGCGATGGCACACCAGCTCCCGGCCAAGGCACACAAGTGACTGTCTCGAG
CGGCGGAGGATCCCAAGTGCAGCTGCAAGAGAGCGGAGGAGGAAGCGTGC
AAGCCGGAGGCTCTCTGAGGCTGAGCTGTACAGTGTCCGGCTACACTTAC
AGCTCCAATTGCATGGGCTGGTTTAGGCAAGCCCCCGGCAAGGAAAGAGA
GGGCGTGGCCACTATCTACACTGGCGGCGGCAACACATACTACGCCGATA
GCGTGAAGGGAAGGTTCACTATCAGCCAAGATAACGCCAAGAACACAGTG
TATCTGCAGATGAACAATCTGAAGCCAGAGGACACTGCCATGTACTACTG
TGCTGCTGAGCCACTGTCTAGGGTGTACGGCGGCAGCTGCCCAACTCCTA
CATTCGACTACTGGGGCCAAGGCACACAAGTGACTGTCTCGTCTGCTAGC
AGAGTGGAATCTAAGTACGGGCCCCCTTGTCCTCCATGTCCTGCTCCAGA
GTTTCTCGGCGGACCCTCCGTGTTCCTGTTTCCTCCAAAGCCTAAGGACA
CCCTGATGATCTCTCGGACCCCTGAAGTGACCTGCGTGGTGGTGGATGTG
TCCCAAGAAGATCCCGAGGTGCAGTTCAATTGGTACGTGGACGGCGTGGA
AGTGCACAACGCCAAGACCAAGCCTAGAGAGGAACAGTTCGGCTCCACCT
ACAGAGTGGTGTCCGTGCTGACAGTGCTGCACCAGGATTGGCTGAACGGC
AAAGAGTACAAGTGCAAGGTGTCCAACAAGGGCCTGCCTTCCAGCATCGA
AAAGACCATCTCCAAGGCCAAGGGCCAGCCTAGGGAACCCCAGGTTTACA
CCCTGCCTCCAAGCCAAGAGGAAATGACCAAGAACCAGGTGTCCCTGACC
TGCCTGGTCAAGGGCTTCTACCCTTCCGATATCGCCGTGGAATGGGAGAG
CAATGGCCAGCCTGAGAACAACTACAAGACCACACCTCCTGTGCTGGACT
CCGACGGCTCCTTCTTTCTGTACTCTCGGCTGACCGTGGACAAGAGCAGA
TGGCAAGAGGGCAACGTGTTCTCCTGCTCCGTGATGCACGAGGCCCTGCA
CAATCACTACACCCAGAAGTCCCTGTCTCTGTCCCTGGGA

[0301] Alternatively, the wild-type human IgG4 Fc (hIgG4 hinge-CH2-CH3) may be employed which has the amino acid sequence:

(SEQ ID NO: 560)
RVESKYGPPCPSCPAPEFLGGPSVFLFPPKPKDTLMISRTPEVTCVVVDV
SQEDPEVQFNWYVDGVEVHNAKTKPREEQFNSTYRVVSVLTVLHQDWLNG
KEYKCKVSNKGLPSSIEKTISKAKGQPREPQVYTLPPSQEEMTKNQVSLT
CLVKGFYPSDIAVEWESNGQPENNYKTTPPVLDSDGSFFLYSRLTVDKSR
WQEGNVFSCSVMHEALHNHYTQKSLSLSLGK.

[0302] In some embodiments the present disclosure provides a heterodimeric Fc comprising at least one anti-IL10Rα V_{H}H antibody and at least one anti-IL2Rγ V_{H}H antibody, wherein anti-IL10Rα V_{H}H antibody/Fc fusion and an anti-IL2Rγ V_{H}H antibody/Fc fusion polypeptides of the heterodimeric Fc are covalently linked via one disulfide bond, optionally two disulfide bonds, optionally three disulfide bonds, or optionally four disulfide bonds. In some embodiments, the anti-IL10Rα V_{H}H antibody/FC fusion and an anti-IL2Rγ V_{H}H antibody/Fc fusion polypeptides are covalently linked via a disulfide bond between the sulfhydryl group of amino acid C226 of the lower hinge domain of the anti-IL10Rα V_{H}H antibody/Fc fusion and the sulfhydryl group of amino acid C226 of the lower hinge domain of the anti-IL2Rγ V_{H}H antibody/Fc fusion. In some embodiments, the two fusions are covalently linked via a disulfide bond between the sulfhydryl group of amino acid C229 of the lower hinge domain of the anti-IL10Rα V_{H}H antibody/Fc fusion and the sulfhydryl group of amino acid C229 of the lower hinge domain of the anti-IL2Rγ V_{H}H antibody/Fc fusion. In some embodiments, a first Fc domain comprises the amino acid substitution S354C, and the second Fc domain comprises the amino acid substitution Y349C. In some embodiments, the heterodimeric Fc comprises a first Fc domain comprising the amino acid substitution S354C and the second Fc domain comprising the amino acid substitution Y349C and wherein the fusions are linked via a disulfide bond between the S354C of the first Fc domain and Y349C of the second Fc domain. In some embodiments, the two polypeptides of the heterodimeric Fc are covalently linked via one or more, optionally two or more optionally three or more disulfide bonds, optionally four or more disulfide bonds between the side chains of the following groups of cystine pairs: (a) C96 of the first Fc fusion and C199 of the second Fc fusion; (b) between C226 of the first Fc fusion and the C226 of the second Fc fusion, (c) between C229 of the first Fc fusion and the C229 of the second Fc fusion; and (d) between S354C of the first Fc fusion comprising a S354C amino acid substitution and Y349C of the second Fc fusion comprising a Y349C amino acid substitution.

[0303] In some embodiments the present disclosure provides a heterodimeric Fc wherein either or both of the fusion subunits of the heterodimeric Fc comprise one or more amino acid substitutions to reduce effector function. In some embodiments, the fusion polypeptides comprise a set of amino acid substitutions selected from the group consisting of: (a) L234A/L235A/P329A (“LALAPA”); L234A/L235A/P329G (“LALAPG”); L234A/L235E/G237A/A330S/P331S (“AEASS”); E233P/L234V/L235A/AG237 (PVAdelG); and L234F/L235E/P331S (“FES”).

[0304] In some embodiments the present disclosure provides a heterodimeric Fc wherein either or both of the fusion subunits of the heterodimeric Fc comprises an amino acid substitution at position C220 (EU numbering) of the upper hinge domain to eliminate the sulfhydryl side chain. In some embodiments, the substitution at position C220 is C220S (EU numbering) substitution.

[0305] In some embodiments the present disclosure provides a heterodimeric Fc wherein either or both of the fusion subunits of the heterodimeric Fc comprises amino acid substitutions in the Fc domain at positions M428 and/or N434 (EU numbering). In some embodiments the amino acid substitutions at positions M428 and/or N434 are M428L and/or N434S.

[0306] In some embodiments the present disclosure provides a heterodimeric Fc wherein either or both of the fusion subunits of the heterodimeric Fc comprises amino acid deletions in the Fc domain at positions G446 and/or K447 (EU numbering).

[0307] Illustrative examples of Fc formats useful for binding molecules of the present disclosure are provided schematically in FIGS. 4-7 of the attached drawings.

[0308] In some embodiments the present disclosure provides a heterodimeric Fc wherein either or both of the fusion subunits of the heterodimeric Fc are PEGylated. In some embodiments, either or both of the fusion subunits are PEGylated via the sulfhydryl side chain of amino acid C220 of the upper hinge.

[0309] In some embodiments, the present disclosure provides an expression cassette encoding a heterodimeric Fc comprising a nucleic acid sequence encoding anti-IL10Rα V_{H}H antibody/Fc fusion and an anti-IL2Rγ V_{H}H antibody/Fc fusion polypeptides operably linked to one or more heterologous nucleic acid sequences, wherein the nucleic acid sequences encoding the anti-IL10Rα V_{H}H antibody/Fc fusion and an anti-IL2Rγ V_{H}H antibody/Fc fusion polypeptides are: (a) under the control a single promoter and (b) are linked via an intervening sequence that facilitates co-expression. In some embodiments wherein the nucleic acid sequences encoding the anti-IL10Rα V_{H}H antibody/Fc fusion and an anti-IL2Rγ V_{H}H antibody/Fc fusion polypeptides are linked via an intervening sequence that facilitates co-expression, the nucleic acid sequence encoding the anti-IL10Rα V_{H}H antibody/Fc fusion polypeptide is 5′ relative to the nucleic acid sequence encoding the anti-IL2Rγ V_{H}H antibody/Fc fusion polypeptide. In some embodiments wherein the nucleic acid sequences encoding the anti-IL10Rα V_{H}H antibody/Fc fusion and an anti-IL2Rγ V_{H}H antibody/Fc fusion polypeptides are linked via an intervening sequence that facilitates co-expression, the nucleic acid sequence encoding the anti-IL2Rγ V_{H}H antibody/Fc fusion polypeptide is 5′ relative to the nucleic acid sequence encoding the anti-IL10Rα V_{H}H antibody/Fc fusion polypeptide. In some embodiments, the intervening sequence to facilitate co-expression is an IRES element or a T2A sequence.

[0310] In some embodiments, the present disclosure provides an expression cassette encoding a heterodimeric Fc comprising a nucleic acid sequence encoding anti-IL10Rα V_{H}H antibody/Fc fusion and an anti-IL2Rγ V_{H}H antibody/Fc fusion polypeptides operably linked to one or more heterologous nucleic acid sequences, wherein the nucleic acid sequences encoding the anti-IL10Rα V_{H}H antibody/Fc fusion and an anti-IL2Rγ V_{H}H antibody/Fc fusion polypeptides are: (a) under the control a single promoter and (b) are linked via an intervening sequence that facilitates co-expression in a mammalian cell.

[0311] The present disclosure further provides a recombinant vector encoding a heterodimeric Fc, the vector comprising a first expression cassette encoding an anti-IL10Rα V_{H}H antibody/Fc fusion polypeptide and a second expression cassette comprising a nucleic acid sequence encoding a anti-IL2Rγ V_{H}H antibody/Fc fusion polypeptide. In some embodiments, the vector is viral vector. In some embodiments, the vector is non-viral vector.

[0312] Further provided is a recombinantly modified cell comprising a nucleic acid molecule or vector of the disclosure. In some embodiments, the cell is a prokaryotic cell, such as a bacterial cell. In some embodiments, the cell is a eukaryotic cell, such as a mammalian cell. Also provided is a cell culture comprising at least one recombinantly modified cell of the disclosure, and a culture medium.

[0313] In some embodiments, the recombinantly modified cell is transformed with a recombinant vector encoding a heterodimeric Fc, the vector comprising a first expression cassette encoding an anti-IL2Rγ V_{H}H antibody/Fc fusion polypeptide and a second expression cassette comprising a nucleic acid sequence encoding an anti-IL10Rα V_{H}H antibody/Fc fusion polypeptide. In some embodiments, the recombinantly modified cell is transformed with a recombinant vector encoding a heterodimeric Fc, the vector comprising a first expression cassette encoding an anti-IL10Rα V_{H}H antibody/Fc fusion polypeptide and a second expression cassette comprising a nucleic acid sequence encoding a anti-IL2Rγ V_{H}H antibody/Fc fusion polypeptide.

[0314] In some embodiments, the recombinantly modified cell is transformed with a first vector comprising a nucleic acid sequence encoding a anti-IL2Rγ V_{H}H antibody/Fc fusion polypeptide operably linked to one or more expression control sequences and a second vector comprising an expression cassette comprising a nucleic acid sequence encoding a anti-IL10Rα V_{H}H antibody/Fc fusion polypeptide operably linked to one or more expression control sequences. In some embodiments, the recombinantly modified cell is transformed with a first vector comprising a nucleic acid sequence encoding a anti-IL10Rα V_{H}H antibody/Fc fusion polypeptide operably linked to one or more expression control sequences and a second vector comprising an expression cassette comprising a nucleic acid sequence encoding a anti-IL2Rγ V_{H}H antibody/Fc fusion polypeptide operably linked to one or more expression control sequences. In some embodiments, the cell is a prokaryotic cell, such as a bacterial cell. In some embodiments, the cell is a eukaryotic cell, such as a mammalian cell. Also provided is a cell culture comprising at least one recombinantly modified cell of the disclosure, and a culture medium.

[0315] The present disclosure further provides methods for the recombinant production, isolation, purification and characterization of a heterodimeric Fc. Thus, provided herein is a method for producing a heterodimeric Fc of the disclosure. In some embodiments, the method comprises a) providing one or more recombinantly modified cells comprising a nucleic acid molecule or vector comprising a nucleic acid sequence encoding a heterodimeric Fc as disclosed herein; and b) culturing the one or more cells in a culture medium such that the cells produce the heterodimeric Fc encoded by the nucleic acid sequence.

[0316] Also provided is a pharmaceutical composition comprising a heterodimeric Fc of the present disclosure. In some embodiments, the pharmaceutical composition comprises a heterodimeric Fc of the present disclosure and a pharmaceutically acceptable carrier. In some embodiments, the pharmaceutical composition comprises a nucleic acid molecule or vector of the disclosure. In some embodiments, the pharmaceutical composition comprises a recombinantly modified cell of the disclosure. In some embodiments, the recombinantly modified cell is a mammalian cell.

[0317] The present disclosure provides a heterodimeric Fc, the heterodimeric Fc comprising a first polypeptide of the formula #1:

anti-IL10Rα V_{H}H antibody-L1ₐ-UH1-Fc1 [1]

and a second polypeptide of the formula #2:

anti-IL2Rγ V_{H}H antibody-L2_{b}-UH2-Fc2 [2]

wherein:
[0318] L1 and L2 are GSA linkers and a and b are independently selected from 0 (absent) or 1 (present);
[0319] UH1 and UH2 are each an upper hinge domain of human immunoglobulin independently selected from the group consisting of the IgG1, IgG2, IgG3 and IgG4 upper hinge, optionally comprising the amino acid substitution C220S (EU numbering);
[0320] Fc1 is a polypeptide comprising the lower hinge, CH2 and CH3 domains of a human immunoglobulin selected from the group consisting of IgG1, IgG2, IgG3 and IgG4, comprising one or more amino acid substitutions promote heterodimerization with Fc2, and
[0321] FC2 is a polypeptide comprising the lower hinge, CH2 and CH3 domains of a human immunoglobulin selected from the group consisting of IgG1, IgG2, IgG3 and IgG4, comprising one or more amino acid substitutions promote heterodimerization with Fc1, and
   wherein the polypeptide of formula 1 and the polypeptide of formula 2 are linked by at least one interchain disulfide bond.

### Upper Hinge:

[0322] The heterodimeric Fcs of the present disclosure are heterodimers comprising polypeptides of the formulae [1] and [2], which each incorporate an upper hinge region of a human immunoglobulin molecule. The term “upper hinge” or “UH” refers to an amino acid sequence corresponding to amino acid residues 216-220 (EU numbering) of a human immunoglobulin molecule. In some embodiments, the upper hinge region is a naturally occurring upper hinge region of a human immunoglobulin selected from the LH regions of human IgG1, human IgG2, human IgG3 and human IgG4 upper hinge domains. In some embodiments, the upper hinge region is the upper hinge region of a human IgG1 immunoglobulin. In some embodiments, the upper hinge region is the upper hinge region of a human IgG1 immunoglobulin comprising the pentameric amino acid sequence: EPKSC (SEQ ID NO: 11).

[0323] In some embodiments, the upper hinge region contains an unpaired cysteine residue at position 220 (EU numbering) that typically, in a complete immunoglobulin molecule, binds to a cysteine on a light chain. When only the Fc domain is used comprising the hinge domain, the unpaired cysteine in the hinge domain creates the potential of the formation of improper disulfide bonds. Consequently, in some embodiments the cysteine at position 220 (C220, numbered in accordance with EU numbering) is substituted with an amino acid that does not promote disulfide bonding. In some embodiments, the Fc domain comprises a C220S mutation having the amino acid sequence EPKSS.

### Fc1 and Fc2:

[0324] The heterodimeric Fcs of the present disclosure are heterodimers comprising polypeptides of the formulae [1] and [2], which each incorporate an Fc region (Fc1 and Fc2) of a human immunoglobulin molecule modified to promote heterodimerization.

[0325] As used herein the term “FC” and “Fc monomer” are used interchangeably herein to designate the monomeric polypeptide subunit of an Fc dimer. An Fc comprises an amino acid sequence (from amino to carboxy terminal) comprising a lower hinge domain and the CH2 and CH3 domains of a human immunoglobulin molecule. In some embodiments, the Fc monomer is a polypeptide comprising the lower hinge domain and the CH2 and CH3 domains of a human immunoglobulin molecule domains of human IgG1, human IgG2, human IgG3 and human IgG4 hinge domains. The CH2 domain of hIgG1 corresponds to amino acid residues 231-340 (EU numbering) and is provided as SEQ ID NO: 14. The CH3 domain of hIgG1 corresponds to amino acid residues 341-447(EU numbering).

[0326] The polypeptides of the formulae [1] and [2] each incorporate a lower hinge region of a human immunoglobulin. As used herein, the term “lower hinge” or “LH” refers to an amino acid sequence corresponding to amino acid residues 221-229 (EU numbering) of a human immunoglobulin molecule. In some embodiments, the lower hinge region is a naturally occurring lower hinge region of a human immunoglobulin selected from the LH regions of IgG1, IgG2, IgG3 and IgG4 lower hinge domains. In some embodiments, the lower hinge region is the lower hinge region of a human IgG1 immunoglobulin. In some embodiments, the lower hinge region is the lower hinge region of a human IgG1 immunoglobulin comprising the decameric amino acid sequence: DKTHTCPPCP.

[0327] In some embodiments, Fc1 and Fc2 are derived from a polypeptide corresponding to amino acids 221-447 (EU numbering) of the human IgG1 immunoglobulin having the amino acid sequence (EU numbering indicated:

```
              230 240 250 260
DKTHTCPPCP APELLGGPSV FLFPPKPKDT LMISRTPEVT
              270 280. 290. 300
CVVVDVSHED PEVKFNWYVD GVEVHNAKTK PREEQYNSTY
              310 320 330 340
RVVSVLTVLH QDWLNGKEYK CKVSNKALPA PIEKTISKAK
              350 360 370 380
GQPREPQVYT LPPSRDELTK NQVSLTCLVK GFYPSDIAVE
              390 400 410 420
WESNGQPENN YKTTPPVLDS DGSFFLYSKL TVDKSRWQQG
              430 440 447
NVFSCSVMHE ALHNHYTQKS LSLSPGK
```

[0328] As indicated in above sequence, the C-terminal residue of the wild-type form of the IgG1 Fc domain is a lysine, referred to as K447 in accordance with EU numbering. The K447 is inconsistently removed by the producer cell during recombinant product. As a result, the population of recombinant Fc monomers may be heterogenous in that some fraction of the recombinantly produced Fc monomers will contain K447 and others will not. Such inconsistent proteolytic processing by producer cells may therefore result in a heterogenous population of Fcs. Typically, particularly in the context of human pharmaceutical agents, such heterogeneity of the active pharmaceutical ingredient is to be avoided. Consequently, in addition to modifications to the Fc monomer sequence promote heterodimerization, the present disclosure provides Fc monomers that further comprising a deletion of the C-terminal K447 or a deletion of G446 and K447 and nucleic acid sequences encoding Fc monomers comprising a: (a) a deletion of the lysine residue at position 447 (K447, EU numbering, abbreviated as AK447 or des-K447), or (b) deletion of both the glycine at position 456 (G446 EU numbering, abbreviated as des-G446) and K447 (this double deletion of G446 and K447 being referred to herein as des-G446/des-K447 or AG446/AK447).

### Modifications of Fc Subunits to Promote Heterodimerization

[0329] As provided in formulae [1] and [2] above, the Fc1 and Fc2 monomers of the dimeric Fc contain amino acid substitutions that promote heterodimerization between Fc1 and Fc2. A variety of techniques are established for the promotion of heterodimerization of Fc domains. See, e.g. Gillies, et al. United States patent No. Kim, et al., U.S. Pat. No. 11,087,249, issued Aug. 3, 2021. In some embodiments, the modifications to promoter heterodimerization of the Fc1 and Fc2 monomers are the HF-TA mutations and the HA-TF mutations as described in Moore, et al (2011) mAbs 3(6):546-557. The HF-TA method employs the S364H/T394F substitutions on one Fc monomer and the Y349T/F405A substitutions on the complementary Fc monomer. The (HA-TF) method employs the S364H/F405A substitutions on one Fc monomer and the Y349T/T394F substitutions on the complementary Fc monomer. Alternatively, the Fc1 and Fc2 monomers are modified to promote heterodimerization by the ZW1 heterodimerization method which employs the T350V/L351Y/F405A/Y407V substitutions on one Fc monomer and the T350V/T366L/K392L/T394W substitutions on the complementary Fc monomer. Von Kreudenstein, et al (2013) mAbs, 5(5):646-654. Alternatively, the Fc1 and Fc2 monomers are modified to promote heterodimerization by the EW-RVT heterodimerization method which employs the K360E/K409W substitutions on one Fc monomer and the Q347R/D399V/F405T substitutions on the complementary Fc monomer. Choi, et al (2015) Molecular Immunology 65(2):377-83.

[0330] In one embodiment, Fc1 and Fc2 are modified to promote heterodimerization by the employment of the “knob-into-hole” (abbreviated KiH) modification as exemplified herein. The KiH modification comprises one or more amino acid substitutions in a first Fc monomer (e.g. Fc1) that create a bulky “knob” domain on a first Fc and one or more amino acid substitutions on a second Fc monomer (e.g. Fc2) that create a complementary pocket or “hole” to receive the “knob” of the first Fc monomer.

[0331] The knob-into-hole format is used to facilitate the expression of a first polypeptide on a first Fc monomer with a “knob” modification and a second polypeptide on the second Fc monomer possessing a “hole” modification to facilitate the expression of heterodimeric polypeptide conjugates. In some embodiments, the IL10Rα/IL2Rγ bivalent binding molecule covalently linked to a single subunit of the Fc as illustrated in FIG. 6, a IL10Rα/IL2Rγ bivalent binding molecule is provided on each of the subunits of the Fc as illustrated in FIG. 7A.

[0332] A variety of amino acid substitutions have been established for the creation of complementary knob and hole Fc monomers. See, e.g. Ridgway, et al (1996) Protein Engineering 9(7):617-921; Atwell, et al (1997) J. Mol. Biol. 270:26-35; Carter, et al. U.S. Pat. No. 5,807,706 issued Sep. 15, 1998; Carter, et al U.S. Pat. No. 7,695,936 issued Apr. 13, 2010; Zhao et al. “A new approach to produce IgG4-like bispecific antibodies,” Scientific Reports 11: 18630 (2021); Cao et al. “Characterization and Monitoring of a Novel Light-heavy-light Chain Mispair in a Therapeutic Bispecific Antibody,” and Liu et al. “Fc Engineering for Developing Therapeutic Bispecific Antibodies and Novel Scaffolds”. Frontiers in Immunology. 8: 38. doi:10.3389/fimmu.2017.00038 (2017).

[0333] In some embodiments, the Fc domain comprises two Fc monomers wherein the CH3 domain of a first Fc monomer wherein the threonine at (EU numbering) position 366 is modified with a bulky residue (e.g. a T366W) create a “knob” and the substitution, and a second Fc monomer comprising one or more substitutions in complementary residues of the CH3 domain of the second Fc monomer to create a pocket or “hole” to receive the bulky residue, for example by amino acid substitutions such as T366S, L368A, and/or Y407V.

[0334] In one embodiment, the Fc1 monomer of formula 1 is a “knob” modified Fc monomer comprising the amino acid substitution T366W and the Fc2 monomer of formula 2 is a “hole” modified Fc comprising the set of amino acid substitutions T366S/L368A/Y407V.

[0335] Alternatively, the Fc1 monomer of formula 1 is a “hole” modified Fc monomer comprising the set of amino acid substitutions T366S/L368A/Y407V and the Fc2 monomer of formula 2 is a “knob” modified Fc monomer comprising the amino acid substitution T366W.

[0336] An example of an engineered Fc heterodimeric pair comprising complementary KiH modifications is provided in the Table below:

TABLE
Amino Acid Substitution Sets of Complementary
IgG1 KiH Heterodimeric Pairs

| Fc | | Amino Acid |
|---|---|---|
| Dimer | Fc | Substitution Set |
| No. | Monomer | (EU Numbering) |
| 1 | Knob | T366W |
| | Hole | T366S/L368A/Y407V |

[0337] As noted, the heterodimeric Fes of the present disclosure are provided as a complementary heterodimeric pair of polypeptides of the formulae [1] and [2] wherein the first and second polypeptide are linked by at least one disulfide bond. In some embodiments, the incorporation of a disulfide bond between the polypeptides of formulae [1] and [2] may be achieved by cysteine substitutions at particular points within the Fc1 and Fc2 domains. In one embodiment, the Fc1 domain of the polypeptide of formula [1] is derived from the Fc domain of hIgG1 comprising an amino acid substitution S354C (EU numbering) and the Fc2 domain of the polypeptide of formula [2] is derived from the Fc domain of hIgG1 comprising an amino acid substitution Y349C (EU numbering) to provide a disulfide bond between the S354C of Fc1 and Y349C of Fc2. Alternatively, the Fc1 domain of the polypeptide of formula [1] is derived from the Fc domain of hIgG1 comprising an amino acid substitution Y349C (EU numbering) and the Fc2 domain of the polypeptide of formula [2] is derived from the Fc domain of hIgG1 comprising an amino acid substitution S354C (EU numbering) to provide a disulfide bond between the S354C of Fc1 and Y349C of Fc2.

[0338] Further examples of complementary KiH engineered heterodimeric Fc pairs that may be used in the practice of the present disclosure are provided in the Table below.

TABLE
Knob-into-Hole Fc Dimer Pairs

| Fc | | | | | | |
|---|---|---|---|---|---|---|
| Dimer | Monomer | Monomer | UH | UH SEQ | Fc Amino Acid Substitutions | |
| Pair. | Type | SEQ ID | Sequence | ID | (EU Numbering) | Fc Seq ID |
| 2 | Knob | 19 | wt | 11 | T366W | 17 |
| | Hole | 20 | wt | 11 | T366S/L368A/Y407V | 18 |
| 3 | Knob | 21 | C220S | 12 | T366W | 17 |
| | Hole | 22 | C220S | 12 | T366S/L368A/Y407V | 18 |
| 4 | Knob | 23 | wt | 11 | T366W | 17 |
| | Hole | 24 | wt | 11 | T366S/L368A/Y407V | 18 |
| 5 | Knob | 25 | C220S | 12 | S354C/T366W | 17 |
| | Hole | 26 | C220S | 12 | Y349C/T366S/L368A/Y407V | 18 |

### Additional Fc Modifications

[0339] In addition to the modifications to promote heterodimerization of the Fc1 and Fc2 domains, Fc1 and Fc2 may optionally provide additional amino acid modifications that mitigate effector function, or eliminate the glycosylation site at N297 such as N297Q.

### Modifications to Reduce Effector Functions

[0340] In some embodiments the amino acid sequence of the Fc1 and/or Fc2 monomers modified to promote heterodimerization may be further modified to reduce effector function. In some embodiments, the Fc domain may be modified to substantially reduce binding to Fc receptors (FcyR and FcR) which reduces or abolishes antibody directed cytotoxicity (ADCC) effector function. Modification of Fc domains to reduce effector function are well known in the art. See, e.g., Wang, et al. (2018) IgG Fc engineering to modulate antibody effector functions, Protein Cell 9(1):63-73. For example, mutation of the lysine residue at position 235 (EU numbering) from leucine (L) to glutamic acid (E) is known to reduce effector function by reducing FcgR and C1q binding. Alegre, et al. (1992) J. Immunology 148:3461-3468.

[0341] Additionally, substitution of the two leucine (L) residues at positions 234 and 235 (EU numbering) in the IgG1 hinge region with alanine (A), i.e., L234A and L235A, results in decreased complement dependent cytotoxicity (CDC) and antibody dependent cellular cytotoxicity (ADCC). Hezereh et al., (2001) J. Virol 75(24):12161-68. Furthermore, mutation of the proline at position 329 (EU numbering) to alanine (P329A) or glycine, (P329G) mitigates effector function and may be combined with the L234A and L235A substitutions. In some embodiments, the Fc domains (Fc1 and Fc2) of the compositions of the present invention may comprises the amino acid substitutions L234A/L235A/P329A (EU numbering) referred to as the “LALAPA” substitutions or L234A/L235A/P329G (EU numbering) referred to as the “LALAPG” substitutions. In some embodiments, the Fc domains (Fc1 and Fc2) of the compositions of the present disclosure may comprises the amino acid substitutions E233P/L234V/L235A/AG237 (referred to in the scientific literature as the PVAdelG mutation).

[0342] In some embodiments, the Fc domains (Fc1 and Fc2) of the compositions of the present disclosure are from hIgG4. In such instances where the Fc domains of the heterodimeric Fc are derived from hIgG4, attenuation of effector function may be achieve by introduction of the S228P and/or the L235E mutations (EU numbering).

[0343] Examples of paired KiH Fc dimeric constructs that may be incorporated into the Fcs of the present disclosure are provided in the Table below:

TABLE
Amino Acid Substitution Sets of Complementary IgG1 KiH UH/Fc Heterodimeric
Pairs Comprising Mutations to Reduce Effector Function

| Fc | | |
|---|---|---|
| Dimer | UH Fc | Amino Acid Substitution Set |
| No. | Monomer | (EU Numbering) |
| 6 | Knob | L234A/L235A/P329A/T366W/ΔK447 |
| | Hole | L234A/L235A/P329A/T366S/L368A/Y407V/ΔK447 |
| 7 | Knob | C220S/L234A/L235A/P329A/T366W/ΔK447 |
| | Hole | C220S/L234A/L235A/P329A/T366S/L368A/Y407V/ΔK447 |
| 8 | Knob | L234A/L235A/P329A/S354C/T366W/ΔK447 |
| | Hole | L234A/L235A/P329A/Y349C/T366S/L368A/Y407V/ΔK447 |
| 9 | Knob | C220S/L234A/L235A/P329A/S354C/T366W/ΔK447 |
| | Hole | C220S/L234A/L235A/P329A/Y349C/T366S/L368A/Y407V/ΔK447 |
| 10 | Knob | L234A/L235A/P329G/T366W/ΔK447 |
| | Hole | L234A/L235A/P329G/T366S/L368A/Y407V/ΔK447 |
| 11 | Knob | C220S/L234A/L235G/P329A/T366W/ΔK447 |
| | Hole | C220S/L234A/L235G/P329A/T366S/L368A/Y407V/ΔK447 |
| 12 | Knob | L234A/L235A/P329G/S354C/T366W/ΔK447 |
| | Hole | L234A/L235A/P329G/Y349C/T366S/L368A/Y407V/ΔK447 |
| 13 | Knob | C220S/L234A/L235A/P329G/S354C/T366W/ΔK447 |
| | Hole | C220S/L234A/L235A/P329G/Y349C/T366S/L368A/Y407V/ΔK447 |
| 14 | Knob | L234A/L235E/G237A/A330S/P331S/T366W/ΔK447 |
| | Hole | L234A/L235E/G237A/A330S/P331S/T366S/L368A/Y407V/ΔK447 |
| 15 | Knob | C220S L234A/L235E/G237A/A330S/P331S/T366W/ΔK447 |
| | Hole | C220S/L234A/L235E/G237A/A330S/P331S/T366S/L368A/Y407V/ΔK447 |
| 16 | Knob | L234A/L235E/G237A/A330S/P331S/S354C/T366W/ΔK447 |
| | Hole | L234A/L235E/G237A/A330S/P331S/Y349C/T366S/L368A/Y407V/ΔK447 |
| 17 | Knob | C220S/L234A/L235E/G237A/A330S/P331S/S354C/T366W/ΔK447 |
| | Hole | C220S/L234A/L235E/G237A/A330S/P331S/Y349C/T366S/L368A/Y407V/ΔK447 |
| 18 | Knob | L234F/L235E/P331S/T366W/ΔK447 |
| | Hole | L234F/L235E/P331S/T366S/L368A/Y407V/ΔK447 |
| 19 | Knob | C220S/L234F/L235E/P331S/T366W/ΔK447 |
| | Hole | C220S/L234F/L235E/P331S//L368A/Y407V/ΔK447 |
| 20 | Knob | L234F/L235E/P331S/S354C/T366W/ΔK447 |
| | Hole | L234F/L235E/P331S/Y349C/T366S/L368A/Y407V/ΔK447 |
| 21 | Knob | C220S/S/L234F/L235E/P331S/354C/T366W/ΔK447 |
| | Hole | C220S/L234F/L235E/P331S/Y349C/T366S/L368A/Y407V/ΔK447 |

### Sequence Modifications to Extend Duration of Action:

[0344] In some embodiments the amino acid sequence of the Fc1 and/or Fc2 monomers modified to promote heterodimerization may be further modified to incorporate amino acid substitutions which extend the duration of action of the molecule and prevent clearance. In some embodiments, such modifications to the Fc monomer include the amino acid substitutions M428L and N434S (EU numbering) referred to as the “LS” modification. The LS modification may optionally be combined with amino acid substitutions to reduce effector function and provide for disulfide bonds between Fc1 and Fc2. The table below provides exemplary Fc1 and Fc1 heterodimeric pairs possessing complementary sequence modifications to promote heterodimerization that may be employed in the design of the Fc1 and Fc2 polypeptides of the formulae [1] and [2].

[0345] The following Table provides exemplary Fc heterodimeric pairs which may be used in the preparation of Fc1 and Fc2 polypeptides of the heterodimeric Fcs of the present disclosure:

TABLE
Amino Acid Substitution Sets of Complementary IgG1 KiH UH/Fc Heterodimeric Pairs
Comprising Mutations to Reduce Effector Function and LS Halflife Extensions

| Fc | | |
|---|---|---|
| Dimer | UH/Fc | Amino Acid Substitution Set |
| No. | Monomer | (EU Numbering) |
| 22 | Knob | L234A/L235A/P329A/T366W/M428L/N434S/ΔK447 |
| | Hole | L234A/L235A/P329A/T366S/L368A/Y407V/M428L/N434S/ΔK447 |
| 23 | Knob | C220S/L234A/L235A/P329A/T366W/M428L/N434S/ΔK447 |
| | Hole | C220S/L234A/L235A/P329A/T366S/L368A/Y407V/M428L/N434S/ΔK447 |
| 24 | Knob | L234A/L235A/P329A/S354C/T366W/M428L/N434S/ΔK447 |
| | Hole | L234A/L235A/P329A/Y349C/T366S/L368A/Y407V/M428L/N434S/ΔK447 |
| 25 | Knob | C220S/L234A/L235A/P329A/S354C/T366W/M428L/N434S/ΔK447 |
| | Hole | C220S/L234A/L235A/P329A/Y349C/T366S/L368A/Y407V/M428L/N434S/ΔK447 |
| 26 | Knob | L234A/L235A/P329G/T366W/M428L/N434S/ΔK447 |
| | Hole | L234A/L235A/P329G/T366S/L368A/Y407V/M428L/N434S/ΔK447 |
| 27 | Knob | C220S/L234A/L235G/P329A/T366W/M428L/N434S/ΔK447 |
| | Hole | C220S/L234A/L235G/P329A/T366S/L368A/Y407V/M428L/N434S/ΔK447 |
| 28 | Knob | L234A/L235A/P329G/S354C/T366W/M428L/N434S/ΔK447 |
| | Hole | L234A/L235A/P329G/Y349C/T366S/L368A/Y407V/M428L/N434S/ΔK447 |
| 29 | Knob | C220S/L234A/L235A/P329G/S354C/T366W/M428L/N434S/ΔK447 |
| | Hole | C220S/L234A/L235A/P329G/Y349C/T366S/L368A/Y407V/M428L/N434S/ΔK447 |
| 30 | Knob | L234A/L235E/G237A/A330S/P331S/T366W/M428L/N434S/ΔK447 |
| | Hole | L234A/L235E/G237A/A330S/P331S/T366S/L368A/Y407V/M428L/N434S/ΔK447 |
| 31 | Knob | C220S L234A/L235E/G237A/A330S/P331S/T366W/M428L/N434S/ΔK447 |
| | Hole | C220S/L234A/L235E/G237A/A330S/P331S/T366S/L368A/Y407V/M428L/N434S/ΔK447 |
| 32 | Knob | L234A/L235E/G237A/A330S/P331S/S354C/T366W/M428L/N434S/ΔK447 |
| | Hole | L234A/L235E/G237A/A330S/P331S/Y349C/T366S/L368A/Y407V/M428L/N434S/ΔK447 |
| 33 | Knob | C220S/L234A/L235E/G237A/A330S/P331S/S354C/T366W/M428L/N434S/ΔK447 |
| | Hole | C220S/L234A/L235E/G237A/A330S/P331S/Y349C/T366S/L368A/Y407V/M428L/N434S/ΔK447 |
| 34 | Knob | L234F/L235E/P331S/T366W/M428L/N434S/ΔK447 |
| | Hole | L234F/L235E/P331S/T366S/L368A/Y407V/M428L/N434S/ΔK447 |
| 35 | Knob | C220S/L234F/L235E/P331S/T366W/M428L/N434S/ΔK447 |
| | Hole | C220S/L234F/L235E/P331S//L368A/Y407V/M428L/N434S/ΔK447 |
| 36 | Knob | L234F/L235E/P331S/S354C/T366W/M428L/N434S/ΔK447 |
| | Hole | Y L234F/L235E/P331S/349C/T366S/L368A/Y407V/M428L/N434S/ΔK447 |
| 37 | Knob | C220S/S/L234F/L235E/P331S/354C/T366W/M428L/N434S/ΔK447 |
| | Hole | C220S/L234F/L235E/P331S/Y349C/T366S/L368A/Y407V/M428L/N434S/ΔK447 |

[0346] In some embodiments, the Fc domains (Fc1 and Fc2) of the compositions of the present disclosure are from hIgG4. In such instances where the Fc domains of the heterodimeric Fc are derived from hIgG4, heterodimerization of the Fc1 and Fc2 domains by the introduction of the mutations K370E, K409W and E357N, D399V, F405T (EU numbering) in the complementary Fc sequences that comprise the heterodimeric Fc domain.

### Modifications to Eliminate Glycosylation Sites

[0347] In some embodiments the amino acid sequence of the Fc1 and/or Fc2 monomers modified to promote heterodimerization may be further modified to eliminate N-linked or 0-linked glycosylation sites. Aglycosylated variants of Fc domains, particularly of the IgG1 subclass are known to be poor mediators of effector function. Jefferies et al. 1998, Immol. Rev., vol. 163, 50-76). It has been shown that glycosylation at position 297 (EU numbering) contributes to effector function. Edelman, et al (1969) PNAS (USA) 63:78-85. In some embodiments, the Fc domains of the compositions of the present disclosure comprise one or modifications to eliminate N- or O linked glycosylation sites. Examples of modifications at N297 to eliminate glycosylation sites in the Fc domain include the amino acid substitutions N297Q and N297G.

[0348] In some embodiments, when the binding protein described herein is to be administered in the format of an Fc domain fusion, particularly in those situations when the polypeptides conjugated to each Fc polypeptide of the Fc domain dimer are different, the Fc domain may be engineered to possess a “knob-into-hole modification.” The knob-into-hole modification is more fully described in Ridgway, et al. (1996) Protein Engineering 9(7):617-621 and U.S. Pat. No. 5,731,168, issued Mar. 24, 1998. The knob-into-hole modification refers to a modification at the interface between two immunoglobulin heavy chains in the CH3 domain, wherein: i) in a CH3 domain of a first heavy chain, an amino acid residue is replaced with an amino acid residue having a larger side chain (e.g., tyrosine or tryptophan) creating a projection from the surface (“knob”), and ii) in the CH3 domain of a second heavy chain, an amino acid residue is replaced with an amino acid residue having a smaller side chain (e.g., alanine or threonine), thereby generating a cavity (“hole”) at interface in the second CH3 domain within which the protruding side chain of the first CH3 domain (“knob”) is received by the cavity in the second CH3 domain. In one embodiment, the “knob-into-hole modification” comprises the amino acid substitution T366W and optionally the amino acid substitution S354C in one of the antibody heavy chains, and the amino acid substitutions T366S, L368A, Y407V and optionally Y349C in the other one of the antibody heavy chains. Furthermore, the Fc domains may be modified by the introduction of cysteine residues at positions S354 and Y349 which results in a stabilizing disulfide bridge between the two antibody heavy chains in the Fc region (Carter, et al. (2001) Immunol Methods 248, 7-15). The knob-into-hole format is used to facilitate the expression of a first polypeptide (e.g., a first V_{H}H in a binding protein described herein) on a first Fc polypeptide with a “knob” modification and a second polypeptide (e.g., a second V_{H}H in a binding protein described herein) on the second Fc polypeptide with a “hole” modification to facilitate the expression of heterodimeric polypeptide conjugates.

[0349] In some embodiments, the binding proteins described herein can have the formats as illustrated in FIGS. 1A-1D. In one example, a first binding protein comprising an anti-IL10Rα V_{H}H antibody at the N-terminus and an anti-IL2Rγ V_{H}H antibody at the C-terminus (e.g., N-terminus-anti-IL10Rα V_{H}H antibody-linker-anti-IL2Rγ V_{H}H antibody-C-terminus) can be fused to a first Fc polypeptide, and a second binding protein comprising an anti-IL2Rγ V_{H}H antibody at the N-terminus and an anti-IL10Rα V_{H}H antibody at the C-terminus (e.g., N-terminus-anti-IL2Rγ V_{H}H antibody-linker-anti-IL10Rα V_{H}H antibody-C-terminus) can be fused to a second Fc polypeptide (FIG. TA), in which the first Fc polypeptide and the second Fc polypeptide form an Fc domain. In this example, one Fc polypeptide can comprise T366W as a knob mutation and the other Fc polypeptide can comprise T366S, L368A, Y407V as hole mutations to promote Fc heterodimer formation.

[0350] In another example, two identical binding proteins can each be conjugated to an Fc polypeptide. Two identical binding protein-Fc polypeptide conjugates can then dimerize to form a homodimer (FIG. 1B). In some embodiments, both binding proteins can have an anti-IL10Rα V_{H}H antibody at the N-terminus and an anti-IL2Rγ V_{H}H antibody at the C-terminus (e.g., N-terminus-anti-IL10Rα V_{H}H antibody-linker-anti-IL2Rγ V_{H}H antibody-C-terminus). In other embodiments, both binding proteins can have an anti-IL2Rγ V_{H}H antibody at the N-terminus and an anti-IL10Rα V_{H}H antibody at the C-terminus (e.g., N-terminus-anti-IL2Rγ V_{H}H antibody-linker-anti-IL10Rα V_{H}H antibody-C-terminus).

[0351] In yet another example, a binding protein can be conjugated to one of the two Fc polypeptides in an Fc domain (FIGS. 1C and 1D). In this case, one Fc polypeptide can comprise T366W as a knob mutation and the other Fc polypeptide can comprise T366S, L368A, Y407V as hole mutations to promoter heterodimer formation. The binding protein can have an anti-IL10Rα V_{H}H antibody at the N-terminus and an anti-IL2Rγ V_{H}H antibody at the C-terminus (e.g., N-terminus-anti-IL10Rα V_{H}H antibody-linker-anti-IL2Rγ V_{H}H antibody-C-terminus). In other embodiments, the binding protein can have an anti-IL2Rγ V_{H}H antibody at the N-terminus and an anti-IL10Rα V_{H}H antibody at the C-terminus (e.g., N-terminus-anti-IL2Rγ V_{H}H antibody-linker-anti-IL10Rα V_{H}H antibody-C-terminus).

[0352] In some embodiments, the binding protein can be conjugated to one or more water-soluble polymers, optionally comprising an intervening linker. Examples of water soluble polymers useful in the practice of the present disclosure include polyethylene glycol (PEG), poly-propylene glycol (PPG), polysaccharides (polyvinylpyrrolidone, copolymers of ethylene glycol and propylene glycol, poly(oxyethylated polyol), polyolefinic alcohol), polysaccharides), poly-alpha-hydroxy acid), polyvinyl alcohol (PVA), polyphosphazene, polyoxazolines (POZ), poly(N-acryloylmorpholine), or a combination thereof.

[0353] In some embodiments, binding protein can be conjugated to one or more polyethylene glycol molecules or “PEGylated.” Although the method or site of PEG attachment to the binding protein may vary, in certain embodiments the PEGylation does not alter, or only minimally alters, the activity of the binding protein. A variety of technologies are available for site specific incorporation of PEG moieties as reviewed in Dozier, J. K. and Distefano, M. D. (2015) “Site Specific Pegylation of Therapeutic Proteins” International Journal of Molecular Science 16(10):25832-25864.

[0354] In some embodiments, selective PEGylation of the binding protein, for example, by the incorporation of non-natural amino acids having side chains to facilitate selective PEG conjugation, may be employed. Specific PEGylation sites can be chosen such that PEGylation of the binding protein does not affect its binding to the target receptors.

[0355] In certain embodiments, the increase in half-life is greater than any decrease in biological activity. PEGs suitable for conjugation to a polypeptide sequence are generally soluble in water at room temperature, and have the general formula R(O—CH₂—CH₂)ₙO—R, where R is hydrogen or a protective group such as an alkyl or an alkanol group, and where n is an integer from 1 to 1000. When R is a protective group, it generally has from 1 to 8 carbons. The PEG conjugated to the polypeptide sequence can be linear or branched. Branched PEG derivatives, “star-PEGs” and multi-armed PEGs are contemplated by the present disclosure.

[0356] A molecular weight of the PEG used in the present disclosure is not restricted to any particular range. The PEG component of the binding protein can have a molecular mass greater than about 5 kDa, greater than about 10 kDa, greater than about 15 kDa, greater than about 20 kDa, greater than about 30 kDa, greater than about 40 kDa, or greater than about 50 kDa. In some embodiments, the molecular mass is from about 5 kDa to about 10 kDa, from about 5 kDa to about 15 kDa, from about 5 kDa to about 20 kDa, from about 10 kDa to about 15 kDa, from about 10 kDa to about 20 kDa, from about 10 kDa to about 25 kDa, or from about 10 kDa to about 30 kDa. Linear or branched PEG molecules having molecular weights from about 2,000 to about 80,000 daltons, alternatively about 2,000 to about 70,000 daltons, alternatively about 5,000 to about 50,000 daltons, alternatively about 10,000 to about 50,000 daltons, alternatively about 20,000 to about 50,000 daltons, alternatively about 30,000 to about 50,000 daltons, alternatively about 20,000 to about 40,000 daltons, or alternatively about 30,000 to about 40,000 daltons. In one embodiment of the disclosure, the PEG is a 40 kD branched PEG comprising two 20 kD arms.

[0357] The present disclosure also contemplates compositions of conjugates wherein the PEGs have different n values, and thus the various different PEGs are present in specific ratios. For example, some compositions comprise a mixture of conjugates where n=1, 2, 3 and 4. In some compositions, the percentage of conjugates where n=1 is 18-25%, the percentage of conjugates where n=2 is 50-66%, the percentage of conjugates where n=3 is 12-16%, and the percentage of conjugates where n=4 is up to 5%. Such compositions can be produced by reaction conditions and purification methods known in the art. Chromatography may be used to resolve conjugate fractions, and a fraction is then identified which contains the conjugate having, for example, the desired number of PEGs attached, purified free from unmodified protein sequences and from conjugates having other numbers of PEGs attached.

[0358] PEGs suitable for conjugation to a polypeptide sequence are generally soluble in water at room temperature, and have the general formula R(O—CH₂—CH₂)ₙO—R, where R is hydrogen or a protective group such as an alkyl or an alkanol group, and where n is an integer from 1 to 1000. When R is a protective group, it generally has from 1 to 8 carbons.

[0359] Two widely used first generation activated monomethoxy PEGs (mPEGs) are succinimdyl carbonate PEG (SC-PEG; see, e.g., Zalipsky, et al. (1992) Biotehnol. Appl. Biochem 15:100-114) and benzotriazole carbonate PEG (BTC-PEG; see, e.g., Dolence, et al. U.S. Pat. No. 5,650,234), which react preferentially with lysine residues to form a carbamate linkage but are also known to react with histidine and tyrosine residues. Use of a PEG-aldehyde linker targets a single site on the N-terminus of a polypeptide through reductive amination.

[0360] Pegylation most frequently occurs at the α-amino group at the N-terminus of the polypeptide, the epsilon amino group on the side chain of lysine residues, and the imidazole group on the side chain of histidine residues. Since most recombinant polypeptides possess a single alpha and a number of epsilon amino and imidazole groups, numerous positional isomers can be generated depending on the linker chemistry. General PEGylation strategies known in the art can be applied herein.

[0361] The PEG can be bound to a binding protein of the present disclosure via a terminal reactive group (a “spacer”) which mediates a bond between the free amino or carboxyl groups of one or more of the polypeptide sequences and polyethylene glycol. The PEG having the spacer which can be bound to the free amino group includes N-hydroxysuccinylimide polyethylene glycol, which can be prepared by activating succinic acid ester of polyethylene glycol with N-hydroxysuccinylimide.

[0362] In some embodiments, the PEGylation of the binding proteins is facilitated by the incorporation of non-natural amino acids bearing unique side chains to facilitate site specific PEGylation. The incorporation of non-natural amino acids into polypeptides to provide functional moieties to achieve site specific PEGylation of such polypeptides is known in the art. See e.g., Ptacin et al., PCT International Application No. PCT/US2018/045257 filed Aug. 3, 2018 and published Feb. 7, 2019 as International Publication Number WO 2019/028419A1.

[0363] The PEG conjugated to the polypeptide sequence can be linear or branched. Branched PEG derivatives, “star-PEGs” and multi-armed PEGs are contemplated by the present disclosure. Specific embodiments PEGs useful in the practice of the present disclosure include a 10 kDa linear PEG-aldehyde (e.g., Sunbright® ME-100AL, NOF America Corporation, One North Broadway, White Plains, NY 10601 USA), 10 kDa linear PEG-NHS ester (e.g., Sunbright® ME-100CS, Sunbright® ME-100AS, Sunbright® ME-100GS, Sunbright® ME-100HS, NOF), a 20 kDa linear PEG-aldehyde (e.g., Sunbright® ME-200AL, NOF), a 20 kDa linear PEG-NHS ester (e.g., Sunbright® ME-200CS, Sunbright® ME-200AS, Sunbright® ME-200GS, Sunbright® ME-200HS, NOF), a 20 kDa 2-arm branched PEG-aldehyde the 20 kDA PEG-aldehyde comprising two 10 kDA linear PEG molecules (e.g., Sunbright® GL2-200AL3, NOF), a 20 kDa 2-arm branched PEG-NHS ester the 20 kDA PEG-NHS ester comprising two 10 kDA linear PEG molecules (e.g., Sunbright® GL2-200TS, Sunbright® GL200GS2, NOF), a 40 kDa 2-arm branched PEG-aldehyde the 40 kDA PEG-aldehyde comprising two 20 kDA linear PEG molecules (e.g., Sunbright® GL2-400AL3), a 40 kDa 2-arm branched PEG-NHS ester the 40 kDA PEG-NHS ester comprising two 20 kDA linear PEG molecules (e.g., Sunbright® GL2-400AL3, Sunbright® GL2-400GS2, NOF), a linear 30 kDa PEG-aldehyde (e.g., Sunbright® ME-300AL) and a linear 30 kDa PEG-NHS ester.

[0364] In some embodiments, a linker can used to join the binding protein and the PEG molecule. Suitable linkers include “flexible linkers” which are generally of sufficient length to permit some movement between the modified polypeptide sequences and the linked components and molecules. The linker molecules are generally about 6-50 atoms long. The linker molecules may also be, for example, aryl acetylene, ethylene glycol oligomers containing 2-10 monomer units, diamines, diacids, amino acids, or combinations thereof. Suitable linkers can be readily selected and can be of any suitable length, such as 1 amino acid (e.g., Gly), 2, 3, 4, 5, 6, 7, 8, 9, 10, 10-20, 20-30, 30-50 or more than 50 amino acids.

[0365] Examples of flexible linkers include glycine polymers (G)n, glycine-alanine polymers, alanine-serine polymers, glycine-serine polymers (for example, (GmSo)n, (GSGGS)n, (GmSoGm)n, (GmSoGmSoGm)n, (GSGGSm)n, (GSGSmG)n and (GGGSm)n, and combinations thereof, where m, n, and o are each independently selected from an integer of at least 1 to 20, e.g., 1-18, 216, 3-14, 4-12, 5-10, 1, 2, 3, 4, 5, 6, 7, 8, 9, or 10), and other flexible linkers. Glycine and glycine-serine polymers are relatively unstructured, and therefore may serve as a neutral tether between components. Examples of flexible linkers are provided in Section V.

[0366] Additional examples of flexible linkers include glycine polymers (G)n or glycine-serine polymers (e.g., (GS)n, (GSGGS)n, (GGGS)n and (GGGGS)n, where n=1 to 50, for example, 1, 2, 3, 4, 5, 6, 7, 8, 9, 10, 10-20, 20-30, 30-50). A multimer (e.g., 1, 2, 3, 4, 5, 6, 7, 8, 9, 10, 10-20, 20-30, or 30-50) of these linker sequences may be linked together to provide flexible linkers that may be used to conjugate two molecules. Alternative to a polypeptide linker, the linker can be a chemical linker, e.g., a PEG-aldehyde linker. In some embodiments, the binding protein is acetylated at the N-terminus by enzymatic reaction with N-terminal acetyltransferase and, for example, acetyl CoA. Alternatively, or in addition to N-terminal acetylation, the binding protein can be acetylated at one or more lysine residues, e.g., by enzymatic reaction with a lysine acetyltransferase. See, for example Choudhary et al. (2009) Science 325 (5942):834-840.

[0367] In other embodiments, the binding protein can be modified to include an additional polypeptide sequence that functions as an antigenic tag, such as a FLAG sequence. FLAG sequences are recognized by biotinylated, highly specific, anti-FLAG antibodies, as described herein (see e.g., Blanar et al. (1992) Science 256:1014 and LeClair, et al. (1992) PNAS-USA 89:8145). In some embodiments, the binding protein further comprises a C-terminal c-myc epitope tag.

[0368] In some embodiments, the binding protein is expressed as a fusion protein with an albumin molecule (e.g., human serum albumin) which is known in the art to facilitate extended exposure in vivo.

[0369] In some embodiment, the binding proteins (including fusion proteins of the binding proteins) of the present disclosure are expressed as a fusion protein with one or more transition metal chelating polypeptide sequences. The incorporation of such a transition metal chelating domain facilitates purification immobilized metal affinity chromatography (IMAC) as described in Smith, et al. U.S. Pat. No. 4,569,794 issued Feb. 11, 1986. Examples of transition metal chelating polypeptides useful in the practice of the present disclosure are described in Smith, et al. supra and Dobeli, et al. U.S. Pat. No. 5,320,663 issued May 10, 1995, the entire teachings of which are hereby incorporated by reference. Particular transition metal chelating polypeptides useful in the practice of the present disclosure are peptides comprising 3-6 contiguous histidine residues such as a six-histidine peptide (His)₆ and are frequently referred to in the art as “His-tags.”

[0370] The foregoing fusion proteins may be readily produced by recombinant DNA methodology by techniques known in the art by constructing a recombinant vector comprising a nucleic acid sequence comprising a nucleic acid sequence encoding the binding protein in frame with a nucleic acid sequence encoding the fusion partner either at the N-terminus or C-terminus of the binding protein, the sequence optionally further comprising a nucleic acid sequence in frame encoding a linker or spacer polypeptide.

### VII. Pharmaceutical Composition

[0371] The binding proteins of the present disclosure may be administered to a subject in a pharmaceutically acceptable dosage form. The preferred formulation depends on the intended mode of administration and therapeutic application. Pharmaceutical dosage forms of the binding proteins described herein comprise physiologically acceptable carriers that are inherently non-toxic and non-therapeutic. Examples of such carriers include ion exchangers, alumina, aluminum stearate, lecithin, serum proteins, such as human serum albumin, buffer substances such as phosphates, glycine, sorbic acid, potassium sorbate, partial glyceride mixtures of saturated vegetable fatty acids, water, salts, or electrolytes such as protamine sulfate, disodium hydrogen phosphate, potassium hydrogen phosphate, sodium chloride, zinc salts, colloidal silica, magnesium trisilicate, polyvinyl pyrrolidone, cellulose-based substances, and PEG. Carriers for topical or gel-based forms of polypeptides include polysaccharides such as sodium carboxymethylcellulose or methylcellulose, polyvinylpyrrolidone, polyacrylates, polyoxyethylene-polyoxypropylene-block polymers, PEG, polymeric amino acids, amino acid copolymers, and lipid aggregates (such as oil droplets or liposomes).

[0372] The pharmaceutical compositions may also comprise pharmaceutically-acceptable, non-toxic carriers, excipients, stabilizers, or diluents, which are defined as vehicles commonly used to formulate pharmaceutical compositions for animal or human administration. The diluent is selected so as not to affect the biological activity of the combination. Acceptable carriers, excipients, or stabilizers are non-toxic to recipients at the dosages and concentrations employed, and include buffers such as phosphate, citrate, and other organic acids; antioxidants including ascorbic acid and methionine; preservatives (such as octadecyidimethylbenzyl ammonium chloride; hexamethonium chloride; benzalkonium chloride, benzethonium chloride; phenol, butyl or benzyl alcohol; alkyl parabens such as methyl or propyl paraben; catechol; resorcinol; cyclohexanol; 3-pentanol; and m-cresol); low molecular weight (less than about 10 residues) polypeptides; proteins, such as serum albumin, gelatin, or immunoglobulins; hydrophilic polymers such as polyvinylpyrrolidone; amino acids such as glycine, glutamine, asparagine, histidine, arginine, or lysine; monosaccharides, disaccharides, and other carbohydrates including glucose, mannose, or dextrins; chelating agents such as EDTA; sugars such as sucrose, mannitol, trehalose or sorbitol; salt-forming counter-ions such as sodium; metal complexes (e.g., Zn-protein complexes); and/or non-ionic surfactants such as TWEEN™, PLURONICS™ or polyethylene glycol (PEG).

[0373] Formulations to be used for in vivo administration are typically sterile. Sterilization of the compositions of the present disclosure may readily accomplished by filtration through sterile filtration membranes.

[0374] Typically, compositions are prepared as injectables, either as liquid solutions or suspensions; solid forms suitable for solution in, or suspension in, liquid vehicles prior to injection can also be prepared. The preparation also can be emulsified or encapsulated in liposomes or micro particles such as polylactide, polyglycolide, or copolymer for enhanced adjuvant effect, as discussed above (Langer, Science 249: 1527, 1990 and Hanes, Advanced Drug Delivery Reviews 28: 97-119, 1997). The agents of this disclosure can be administered in the form of a depot injection or implant preparation which can be formulated in such a manner as to permit a sustained or pulsatile release of the active ingredient. The pharmaceutical compositions are generally formulated as sterile, substantially isotonic and in full compliance with all Good Manufacturing Practice (GMP) regulations of the U.S. Food and Drug Administration.

[0375] Administration of a binding protein described herein may be achieved through any of a variety of art recognized methods including but not limited to the topical, intravascular injection (including intravenous or intraarterial infusion), intradermal injection, subcutaneous injection, intramuscular injection, intraperitoneal injection, intracranial injection, intratumoral injection, intranodal injection, transdermal, transmucosal, iontophoretic delivery, intralymphatic injection (Senti and Kundig (2009) Current Opinions in Allergy and Clinical Immunology 9(6):537-543), intragastric infusion, intraprostatic injection, intravesical infusion (e.g., bladder), respiratory inhalers including nebulizers, intraocular injection, intraabdominal injection, intralesional injection, intraovarian injection, intracerebral infusion or injection, intracerebroventricular injection (ICVI), and the like. In some embodiments, administration includes the administration of the binding protein itself (e.g., parenteral), as well as the administration of a recombinant vector (e.g., viral or non-viral vector) to cause the in situ expression of the binding protein in the subject. Alternatively, a cell, such as a cell isolated from the subject, could also be recombinantly modified to express the binding protein of the present disclosure.

[0376] The dosage of the pharmaceutical compositions depends on factors including the route of administration, the disease to be treated, and physical characteristics, e.g., age, weight, general health, of the subject. Typically, the amount of a binding protein contained within a single dose may be an amount that effectively prevents, delays, or treats the disease without inducing significant toxicity. A pharmaceutical composition of the disclosure may include a dosage of a binding protein described herein ranging from 0.01 to 500 mg/kg (e.g., from 0.01 to 450 mg, from 0.01 to 400 mg, from 0.01 to 350 mg, from 0.01 to 300 mg, from 0.01 to 250 mg, from 0.01 to 200 mg, from 0.01 to 150 mg, from 0.01 to 100 mg, from 0.01 to 50 mg, from 0.01 to 10 mg, from 0.01 to 1 mg, from 0.1 to 500 mg/kg, from 1 to 500 mg/kg, from 5 to 500 mg/kg, from 10 to 500 mg/kg, from 50 to 500 mg/kg, from 100 to 500 mg/kg, from 150 to 500 mg/kg, from 200 to 500 mg/kg, from 250 to 500 mg/kg, from 300 to 500 mg/kg, from 350 to 500 mg/kg, from 400 to 500 mg/kg, or from 450 to 500 mg/kg) and, in a more specific embodiment, about 1 to about 100 mg/kg (e.g., about 1 to about 90 mg/kg, about 1 to about 80 mg/kg, about 1 to about 70 mg/kg, about 1 to about 60 mg/kg, about 1 to about 50 mg/kg, about 1 to about 40 mg/kg, about 1 to about 30 mg/kg, about 1 to about 20 mg/kg, about 1 to about 10 mg/kg, about 10 to about 100 mg/kg, about 20 to about 100 mg/kg, about 30 to about 100 mg/kg, about 40 to about 100 mg/kg, about 50 to about 100 mg/kg, about 60 to about 100 mg/kg, about 70 to about 100 mg/kg, about 80 to about 100 mg/kg, or about 90 to about 100 mg/kg). In some embodiments, a pharmaceutical composition of the disclosure may include a dosage of a binding protein described herein ranging from 0.01 to 20 mg/kg (e.g., from 0.01 to 15 mg/kg, from 0.01 to 10 mg/kg, from 0.01 to 8 mg/kg, from 0.01 to 6 mg/kg, from 0.01 to 4 mg/kg, from 0.01 to 2 mg/kg, from 0.01 to 1 mg/kg, from 0.01 to 0.1 mg/kg, from 0.01 to 0.05 mg/kg, from 0.05 to 20 mg/kg, from 0.1 to 20 mg/kg, from 1 to 20 mg/kg, from 2 to 20 mg/kg, from 4 to 20 mg/kg, from 6 to 20 mg/kg, from 8 to 20 mg/kg, from 10 to 20 mg/kg, from 15 to 20 mg/kg). The dosage may be adapted by the physician in accordance with conventional factors such as the extent of the disease and different parameters of the subject.

[0377] A pharmaceutical composition containing a binding protein described herein can be administered to a subject in need thereof, for example, one or more times (e.g., 1-10 times or more) daily, weekly, monthly, biannually, annually, or as medically necessary. Dosages may be provided in either a single or multiple dosage regimens. The timing between administrations may decrease as the medical condition improves or increase as the health of the patient declines. A course of therapy may be a single dose or in multiple doses over a period of time. In some embodiments, a single dose is used. In some embodiments, two or more split doses administered over a period of 1, 2, 3, 4, 5, 6, 7, 8, 9, 10, 11, 12, 13, 14, 21, 28, 30, 60, 90, 120 or 180 days are used. Each dose administered in such split dosing protocols may be the same in each administration or may be different. Multi-day dosing protocols over time periods may be provided by the skilled artisan (e.g., physician) monitoring the administration, taking into account the response of the subject to the treatment including adverse effects of the treatment and their modulation as discussed above. In some embodiments, the serum trough concentration of the binding molecule is maintained above a threshold level corresponding to about 0.1 pg/ml, alternatively 0.1 ng/ml, alternatively about 0.5 ng/ml alternatively 1 ng/ml, alternatively 2 ng/ml, for at least 80%, alternatively at least 85%, alternatively at least 90%, alternatively at least 95% of a period of time of at least 24 hours, alternatively 48 hours, alternatively 72 hours, alternatively one week, alternatively 1 month. See, e.g. Mumm, et al. United States Patent Publication US2016/0193300A1 published Jul. 7, 2016.

### VIII. Methods of Use

### Neoplastic Diseases

[0378] The present disclosure provides methods of use of binding proteins that bind to IL10Rα and IL2Rγ in the treatment of subjects suffering from a neoplastic disease, disorder, or condition by the administration of a therapeutically effective amount of a binding protein (or nucleic acid encoding a binding protein including recombinant vectors encoding the binding protein) as described herein. IL10 agonists have been identified as useful in the treatment of neoplastic disease as described in Oft, M. (2014) Cancer Immunology Research 2(3):194-199; Naing, et al. (2108) Cancer Cell 34(5):775-791; and Mumm, J. and Oft, M (2013) Bioessays 35(7):623-631.

[0379] The compositions and methods of the present disclosure are useful in the treatment of subject suffering from a neoplastic disease characterized by the presence neoplasms, including benign and malignant neoplasms, and neoplastic disease. In certain embodiments, the method does not cause anemia.

[0380] Examples benign neoplasms amenable to treatment using the compositions and methods of the present disclosure include but are not limited to adenomas, fibromas, hemangiomas, and lipomas. Examples of pre-malignant neoplasms amenable to treatment using the compositions and methods of the present disclosure include but are not limited to hyperplasia, atypia, metaplasia, and dysplasia. Examples of malignant neoplasms amenable to treatment using the compositions and methods of the present disclosure include but are not limited to carcinomas (cancers arising from epithelial tissues such as the skin or tissues that line internal organs), leukemias, lymphomas, and sarcomas typically derived from bone fat, muscle, blood vessels or connective tissues). Also included in the term neoplasms are viral induced neoplasms such as warts and EBV induced disease (i.e., infectious mononucleosis), scar formation, hyperproliferative vascular disease including intimal smooth muscle cell hyperplasia, restenosis, and vascular occlusion and the like.

[0381] The term “neoplastic disease” includes cancers characterized by solid tumors and non-solid tumors including, but not limited to, breast cancers, sarcomas (including but not limited to osteosarcomas and angiosarcomas and fibrosarcomas), leukemias, lymphomas, genitourinary cancers (including but not limited to ovarian, urethral, bladder, and prostate cancers), gastrointestinal cancers (including but not limited to colon esophageal and stomach cancers), lung cancers, myelomas, pancreatic cancers, liver cancers, kidney cancers, endocrine cancers, skin cancers, and brain or central and peripheral nervous (CNS) system tumors, malignant or benign, including gliomas and neuroblastomas, astrocytomas, myelodysplastic disorders, cervical carcinoma-in-situ, intestinal polyposes, oral leukoplakias, histiocytoses, hyperprofroliferative scars including keloid scars, hemangiomas, hyperproliferative arterial stenosis, psoriasis, inflammatory arthritis, hyperkeratoses, and papulosquamous eruptions including arthritis.

[0382] The term “neoplastic disease” includes carcinomas. The term “carcinoma” refers to malignancies of epithelial or endocrine tissues including respiratory system carcinomas, gastrointestinal system carcinomas, genitourinary system carcinomas, testicular carcinomas, breast carcinomas, prostatic carcinomas, endocrine system carcinomas, and melanomas. The term neoplastic disease includes adenocarcinomas. An “adenocarcinoma” refers to a carcinoma derived from glandular tissue or in which the tumor cells form recognizable glandular structures.

[0383] As used herein, the term “hematopoietic neoplastic disorders” refers to neoplastic diseases involving hyperplastic/neoplastic cells of hematopoietic origin, e.g., arising from myeloid, lymphoid or erythroid lineages, or precursor cells thereof.

[0384] Myeloid neoplasms include, but are not limited to, myeloproliferative neoplasms, myeloid and lymphoid disorders with eosinophilia, myeloproliferative/myelodysplastic neoplasms, myelodysplastic syndromes, acute myeloid leukemia and related precursor neoplasms, and acute leukemia of ambiguous lineage. Exemplary myeloid disorders amenable to treatment in accordance with the present disclosure include, but are not limited to, acute promyeloid leukemia (APML), acute myelogenous leukemia (AML), and chronic myelogenous leukemia (CML).

[0385] Lymphoid neoplasms include, but are not limited to, precursor lymphoid neoplasms, mature B-cell neoplasms, mature T-cell neoplasms, Hodgkin's Lymphoma, and immunodeficiency-associated lymphoproliferative disorders. Exemplary lymphic disorders amenable to treatment in accordance with the present disclosure include, but are not limited to, acute lymphoblastic leukemia (ALL) which includes B-lineage ALL and T-lineage ALL, chronic lymphocytic leukemia (CLL), prolymphocytic leukemia (PLL), hairy cell leukemia (HLL), and Waldenstrom's macroglobulinemia (WM).

[0386] In some instances, the hematopoietic neoplastic disorder arises from poorly differentiated acute leukemias (e.g., erythroblastic leukemia and acute megakaryoblastic leukemia). As used herein, the term “hematopoietic neoplastic disorders” refers malignant lymphomas including, but are not limited to, non-Hodgkins lymphoma and variants thereof, peripheral T cell lymphomas, adult T-cell leukemia/lymphoma (ATL), cutaneous T cell lymphoma (CTCL), large granular lymphocytic leukemia (LGF), Hodgkin's disease, and Reed-Steinberg disease.

[0387] The determination of whether a subject is “suffering from a neoplastic disease” refers to a determination made by a physician with respect to a subject based on the available information accepted in the field for the identification of a disease, disorder or condition including but not limited to X-ray, CT-scans, conventional laboratory diagnostic tests (e.g. blood count, etc.), genomic data, protein expression data, immunohistochemistry, that the subject requires or will benefit from treatment.

### Assessing Anti-Neoplastic Efficacy

[0388] The determination of efficacy of the methods of the present disclosure in the treatment of cancer is generally associated with the achievement of one or more art recognized parameters such as reduction in lesions particularly reduction of metastatic lesion, reduction in metastatsis, reduction in tumor volume, improvement in ECOG score, and the like. Determining response to treatment can be assessed through the measurement of biomarker that can provide reproducible information useful in any aspect of binding protein therapy, including the existence and extent of a subject's response to such therapy and the existence and extent of untoward effects caused by such therapy. By way of example, but not limitation, biomarkers include enhancement of IFNγ, and upregulation of granzyme A, granzyme B, and perforin; increase in CD8⁺ T-cell number and function; enhancement of IFNγ, an increase in ICOS expression on CD8⁺ T-cells, enhancement of IL10 expressing T_{Reg} cells. The response to treatment may be characterized by improvements in conventional measures of clinical efficacy may be employed such as Complete Response (CR), Partial Response (PR), Stable Disease (SD) and with respect to target lesions, Complete Response (CR),” Incomplete Response/Stable Disease (SD) as defined by RECIST as well as immune-related Complete Response (irCR), immune-related Partial Response (irPR), and immune-related Stable Disease (irSD) as defined Immune-Related Response Criteria (irRC) are considered by those of skill in the art as evidencing efficacy in the treatment of neoplastic disease in mammalian (e.g., human) subjects.

[0389] Further embodiments comprise a method or model for determining the optimum amount of an agent(s) in a combination. An optimum amount can be, for example, an amount that achieves an optimal effect in a subject or subject population, or an amount that achieves a therapeutic effect while minimizing or eliminating the adverse effects associated with one or more of the agents. In some embodiments, the methods involving the combination of a binding protein described herein and a supplementary agent which is known to be, or has been determined to be, effective in treating or preventing a disease, disorder or condition described herein (e.g., a cancerous condition) in a subject (e.g., a human) or a subject population, and an amount of one agent is titrated while the amount of the other agent(s) is held constant. By manipulating the amounts of the agent(s) in this manner, a clinician is able to determine the ratio of agents most effective for, for example, treating a particular disease, disorder or condition, or eliminating the adverse effects or reducing the adverse effects such that are acceptable under the circumstances.

Combination of Binding Proteins with Supplementary Therapeutic Agents

[0390] The present disclosure provides the for the use of the binding proteins of the present disclosure in combination with one or more additional active agents (“supplementary agents”). Such further combinations are referred to interchangeably as “supplementary combinations” or “supplementary combination therapy” and those therapeutic agents that are used in combination with binding proteins of the present disclosure are referred to as “supplementary agents.” As used herein, the term “supplementary agents” includes agents that can be administered or introduced separately, for example, formulated separately for separate administration (e.g., as may be provided in a kit) and/or therapies that can be administered or introduced in combination with the binding proteins.

[0391] As used herein, the term “in combination with” when used in reference to the administration of multiple agents to a subject refers to the administration of a first agent at least one additional (i.e. second, third, fourth, fifth, etc.) agent to a subject. For purposes of the present invention, one agent (e.g., a binding protein described herein) is considered to be administered in combination with a second agent (e.g. a modulator of an immune checkpoint pathway) if the biological effect resulting from the administration of the first agent persists in the subject at the time of administration of the second agent such that the therapeutic effects of the first agent and second agent overlap. For example, the PD1 immune checkpoint inhibitors (e.g. nivolumab or pembrolizumab) are typically administered by IV infusion every two weeks or every three weeks while the binding proteins of the present disclosure are typically administered more frequently, e.g. daily, BID, or weekly. However, the administration of the first agent (e.g. pembrolizumab) provides a therapeutic effect over an extended time and the administration of the second agent (e.g., a binding protein described herein) provides its therapeutic effect while the therapeutic effect of the first agent remains ongoing such that the second agent is considered to be administered in combination with the first agent, even though the first agent may have been administered at a point in time significantly distant (e.g. days or weeks) from the time of administration of the second agent. In one embodiment, one agent is considered to be administered in combination with a second agent if the first and second agents are administered simultaneously (within 30 minutes of each other), contemporaneously or sequentially. In some embodiments, a first agent is deemed to be administered “contemporaneously” with a second agent if first and second agents are administered within about 24 hours of each another, preferably within about 12 hours of each other, preferably within about 6 hours of each other, preferably within about 2 hours of each other, or preferably within about 30 minutes of each other. The term “in combination with” shall also understood to apply to the situation where a first agent and a second agent are co-formulated in single pharmaceutically acceptable formulation and the co-formulation is administered to a subject. In certain embodiments, the binding protein and the supplementary agent(s) are administered or applied sequentially, e.g., where one agent is administered prior to one or more other agents. In other embodiments, the binding protein and the supplementary agent(s) are administered simultaneously, e.g., where two or more agents are administered at or about the same time; the two or more agents may be present in two or more separate formulations or combined into a single formulation (i.e., a co-formulation). Regardless of whether the agents are administered sequentially or simultaneously, they are considered to be administered in combination for purposes of the present disclosure.

### Chemotherapeutic Agents

[0392] In some embodiments, the supplementary agent is a chemotherapeutic agent. In some embodiments the supplementary agent is a “cocktail” of multiple chemotherapeutic agents. The use of IL-10 agents in combination with chemotherapeutic agents is described in Oft, et al., U.S. Pat. No. 9,833,514B2 issued Dec. 5, 2017, the teaching of which is herein incorporated by reference. In some embodiments the chemotherapeutic agent or cocktail is administered in combination with one or more physical methods (e.g., radiation therapy). The term “chemotherapeutic agents” includes but is not limited to alkylating agents such as thiotepa and cyclosphosphamide, alkyl sulfonates such as busulfan, improsulfan and piposulfan, aziridines such as benzodopa, carboquone, meturedopa, and uredopa, ethylenimines and methylamelamines including altretamine, triethylenemelamine, trietylenephosphoramide, triethylenethiophosphaoramide and trimethylolomelamime, nitrogen mustards such as chiorambucil, chlomaphazine, cholophosphamide, estramustine, ifosfamide, mechlorethamine, mechlorethamine oxide hydrochloride, melphalan, novembichin, phenesterine, prednimustine, trofosfamide, uracil mustard, nitrosureas such as carmustine, chlorozotocin, fotemustine, lomustine, nimustine, ranimustine, antibiotics such as aclacinomysins, actinomycin, authramycin, azaserine, bleomycins such as bleomycin A2, cactinomycin, calicheamicin, carabicin, caminomycin, carzinophilin, chromomycins, dactinomycin, daunorubicin and derivaties such as demethoxy-daunomycin, 11-deoxydaunorubicin, 13-deoxydaunorubicin, detorubicin, 6-diazo-5-oxo-L-norleucine, doxorubicin, epirubicin, esorubicin, idarubicin, marcellomycin, mitomycins such as mitomycin C, N-methyl mitomycin C, mycophenolic acid, nogalamycin, olivomycins, peplomycin, potfiromycin, puromycin, quelamycin, rodorubicin, streptonigrin, streptozocin, tubercidin, ubenimex, zinostatin, zorubicin, anti-metabolites such as methotrexate and 5-fluorouracil (5-FU), folic acid analogues such as denopterin, methotrexate, pteropterin, trimetrexate, dideazatetrahydrofolic acid, and folinic acid, purine analogs such as fludarabine, 6-mercaptopurine, thiamiprine, thioguanine, pyrimidine analogs such as ancitabine, azacitidine, 6-azauridine, carmofur, cytarabine, dideoxyuridine, doxifluridine, enocitabine, floxuridine, 5-FU, androgens such as calusterone, dromostanolone propionate, epitiostanol, mepitiostane, testolactone, anti-adrenals such as aminoglutethimide, mitotane, trilostane, folic acid replenisher such as frolinic acid, aceglatone, aldophosphamide glycoside, aminolevulinic acid, amsacrine, bestrabucil, bisantrene, edatraxate, defofamine, demecolcine, diaziquone, elformithine, elliptinium acetate, etoglucid, gallium nitrate, hydroxyurea, lentinan, lonidamine, mitoguazone, mitoxantrone, mopidamol, nitracrine, pentostatin, phenamet, pirarubicin, podophyllinic acid, 2-ethylhydrazide, procarbazine, razoxane, sizofiran, spirogermanium, tenuazonic acid, triaziquone, 2,2′,2″-trichlorotriethylamine, urethan, vindesine, dacarbazine, mannomustine, mitobronitol, mitolactol, pipobroman, gacytosine, arabinoside (Ara-C), cyclophosphamide, thiotepa, taxoids, e.g., paclitaxel, nab-paclitaxel and doxetaxel, chlorambucil, gemcitabine, 6-thioguanine, mercaptopurine, methotrexate, platinum and platinum coordination complexes such as cisplatin, oxaplatin and carboplatin, vinblastine, etoposide (VP-16), ifosfamide, mitomycin C, mitoxantrone, vincristine, vinorelbine, navelbine, novantrone, teniposide, daunomycin, aminopterin, xeloda, ibandronate, CPT11, topoisomerase inhibitors, difluoromethylornithine (DMFO), retinoic acid, esperamicins, capecitabine, taxanes such as paclitaxel, docetaxel, cabazitaxel, carminomycin, adriamycins such as 4′-epiadriamycin, 4-adriamycin-14-benzoate, adriamycin-14-octanoate, adriamycin-14-naphthaleneacetate, cholchicine and pharmaceutically acceptable salts, acids or derivatives of any of the above.

[0393] The term “chemotherapeutic agents” also includes anti-hormonal agents that act to regulate or inhibit hormone action on tumors such as anti-estrogens, including for example tamoxifen, raloxifene, aromatase inhibiting 4(5)-imidazoles, 4-hydroxytamoxifen, trioxifene, keoxifene, onapristone, and toremifene; and antiandrogens such as flutamide, nilutamide, bicalutamide, leuprolide, and goserelin; and pharmaceutically acceptable salts, acids or derivatives of any of the above.

[0394] In some embodiments, a supplementary agent is one or more chemical or biological agents identified in the art as useful in the treatment of neoplastic disease, including, but not limited to, a cytokines or cytokine antagonists such as IL12, INFα, or anti-epidermal growth factor receptor, irinotecan; tetrahydrofolate antimetabolites such as pemetrexed; antibodies against tumor antigens, a complex of a monoclonal antibody and toxin, a T-cell adjuvant, bone marrow transplant, or antigen presenting cells (e.g., dendritic cell therapy), anti-tumor vaccines, replication competent viruses, signal transduction inhibitors (e.g., Gleevec® or Herceptin®) or an immunomodulator to achieve additive or synergistic suppression of tumor growth, non-steroidal anti-inflammatory drugs (NSAIDs), cyclooxygenase-2 (COX-2) inhibitors, steroids, TNF antagonists (e.g., Remicade® and Enbrel®), interferon-β1a (Avonex®), and interferon-β1b (Betaseron®) as well as combinations of one or more of the foregoing as practiced in known chemotherapeutic treatment regimens including but not limited to TAC, FOLFOX, TPC, FEC, ADE, FOLFOX-6, EPOCH, CHOP, CMF, CVP, BEP, OFF, FLOX, CVD, TC, FOLFIRI, PCV, FOLFOXIRI, ICE-V, XELOX, and others that are readily appreciated by the skilled clinician in the art.

[0395] In some embodiments, the binding protein is administered in combination with BRAF/MEK inhibitors, kinase inhibitors such as sunitinib, PARP inhibitors such as olaparib, EGFR inhibitors such as osimertinib (Ahn, et al. (2016) J Thorac Oncol 11:S115), IDO inhibitors such as epacadostat, and oncolytic viruses such as talimogene laherparepvec (T-VEC).

Combination with Therapeutic Antibodies

[0396] In some embodiments, a “supplementary agent” is a therapeutic antibody (including bi-specific and tri-specific antibodies which bind to one or more tumor associated antigens including but not limited to bispecific T cell engagers (BITEs), dual affinity retargeting (DART) constructs, and trispecific killer engager (TriKE) constructs). The use of IL10 agents in combination with therapeutic antibodies in the treatment of neoplastic diseases is described in Mumm, et al., U.S. Pat. No. 10,618,970B2 issued Apr. 14, 2020.

[0397] In some embodiments, the therapeutic antibody is an antibody that binds to at least one tumor antigen selected from the group consisting of HER2 (e.g. trastuzumab, pertuzumab, ado-trastuzumab emtansine), nectin-4 (e.g. enfortumab), CD79 (e.g. polatuzumab vedotin), CTLA4 (e.g. ipilumumab), CD22 (e.g. moxetumomab pasudotox), CCR4 (e.g. magamuizumab), IL23p19 (e.g. tildrakizumab), PDL1 (e.g. durvalumab, avelumab, atezolizumab), IL17a (e.g. ixekizumab), CD38 (e.g. daratumumab), SLAMF7 (e.g. elotuzumab), CD20 (e.g. rituximab, tositumomab, ibritumomab and ofatumumab), CD30 (e.g. brentuximab vedotin), CD33 (e.g. gemtuzumab ozogamicin), CD52 (e.g. alemtuzumab), EpCam, CEA, fpA33, TAG-72, CAIX, PSMA, PSA, folate binding protein, GD2 (e.g. dinuntuximab), GD3, IL6 (e.g. silutxumab) GM2, Le^{y}, VEGF (e.g. bevacizumab), VEGFR, VEGFR2 (e.g. ramucirumab), PDGFRα (e.g. olartumumab), EGFR (e.g. cetuximab, panitumumab and necitumumab), ERBB2 (e.g. trastuzumab), ERBB3, MET, IGF1R, EPHA3, TRAIL R1, TRAIL R2, RANKL RAP, tenascin, integrin αVβ3, and integrin α4β1.

[0398] Examples of antibody therapeutics which are FDA approved and may be used as supplementary agents for use in the treatment of neoplastic disease indication include those provided in Table 5 below.

TABLE 5
FDA Antineoplastic Disease Antibodies and Indications

| Name | Tradename(s) | Target; format | Indication |
|---|---|---|---|
| [fam]- | Enhertu | HER2; Humanized IgG1 | HER2⁺ breast cancer |
| trastuzumab | | ADC | |
| deruxtecan | | | |
| Enfortumab | Padcev | Nectin-4; Human IgG1 | Urothelial cancer |
| vedotin | | ADC | |
| Polatuzumab | Polivy | CD79b; Humanized IgG1 | Diffuse large B-cell |
| vedotin | | ADC | lymphoma |
| Cemiplimab | Libtayo | PD-1; Human mAb | Cutaneous squamous cell |
| | | | carcinoma |
| Moxetumomab | Lumoxiti | CD22; Murine IgG1 dsFv | Hairy cell leukemia |
| pasudotox | | immunotoxin | |
| Mogamuizumab | Poteligeo | CCR4; Humanized IgG1 | Cutaneous T cell lymphoma |
| Tildrakizumab | Ilumya | IL23p19; Humanized IgG1 | Plaque psoriasis |
| Ibalizumab | Trogarzo | CD4; Humanized IgG4 | HIV infection |
| Durvalumab | IMFINZI | PD-L1; Human IgG1 | Bladder cancer |
| Inotuzumab | BESPONSA | CD22; Humanized IgG4, | Hematological malignancy |
| ozogamicin | | ADC | |
| Avelumab | Bavencio | PD-L1; Human IgG1 | Merkel cell carcinoma |
| Atezolizumab | Tecentriq | PD-L1; Humanized IgG1 | Bladder cancer |
| Olaratumab | Lartruvo | PDGRFα; Human IgG1 | Soft tissue sarcoma |
| Ixekizumab | Taltz | IL17a; Humanized IgG4 | Psoriasis |
| Daratumumab | Darzalex | CD38; Human IgG1 | Multiple myeloma |
| Elotuzumab | Empliciti | SLAMF7; Humanized IgG1 | Multiple myeloma |
| Necitumumab | Portrazza | EGFR; Human IgG1 | Non-small cell lung cancer |
| Dinutuximab | Unituxin | GD2; Chimeric IgG1 | Neuroblastoma |
| Nivolumab | Opdivo | PD1; Human IgG4 | Melanoma, non-small cell |
| | | | lung cancer |
| Blinatumomab | Blincyto | CD19, CD3; Murine | Acute lymphoblastic leukemia |
| | | bispecific tandem scFv | |
| Pembrolizumab | Keytruda | PD1; Humanized IgG4 | Melanoma |
| Ramucirumab | Cyramza | VEGFR2; Human IgG1 | Gastric cancer |
| Siltuximab | Sylvant | IL6; Chimeric IgG1 | Castleman disease |
| Obinutuzumab | Gazyva | CD20; Humanized IgG1; | Chronic lymphocytic |
| | | Glycoengineered | leukemia |
| Ado-trastuzumab | Kadcyla | HER2; Humanized IgG1, | Breast cancer |
| emtansine | | ADC | |
| Pertuzumab | Perjeta | HER2; Humanized IgG1 | Breast Cancer |
| Brentuximab | Adcetris | CD30; Chimeric IgG1, ADC | Hodgkin lymphoma, systemic |
| vedotin | | | anaplastic large cell |
| | | | lymphoma |
| Ipilimumab | Yervoy | CTLA-4; Human IgG1 | Metastatic melanoma |
| Ofatumumab | Arzerra | CD20; Human IgG1 | Chronic lymphocytic |
| | | | leukemia |
| Certolizumab | Cimzia | TNF; Humanized Fab, | Crohn disease |
| pegol | | pegylated | |
| Catumaxomab | Removab | EPCAM/CD3; Rat/mouse | Malignant ascites |
| | | bispecific mAb | |
| Panitumumab | Vectibix | EGFR; Human IgG2 | Colorectal cancer |
| Bevacizumab | Avastin | VEGF; Humanized IgG1 | Colorectal cancer |
| Cetuximab | Erbitux | EGFR; Chimeric IgG1 | Colorectal cancer |
| Tositumomab- | Bexxar | CD20; Murine IgG2a | Non-Hodgkin lymphoma |
| I131 | | | |
| Ibritumomab | Zevalin | CD20; Murine IgG1 | Non-Hodgkin lymphoma |
| tiuxetan | | | |
| Gemtuzumab | Mylotarg | CD33; Humanized IgG4, | Acute myeloid leukemia |
| ozogamicin | | ADC | |
| Trastuzumab | Herceptin | HER2; Humanized IgG1 | Breast cancer |
| Infliximab | Remicade | TNF; Chimeric IgG1 | Crohn disease |
| Rituximab | MabThera, | CD20; Chimeric IgG1 | Non-Hodgkin lymphoma |
| | Rituxan | | |
| Edrecolomab | Panorex | EpCAM; Murine IgG2a | Colorectal cancer |

[0399] In some embodiments, where the antibody is a bispecific antibody targeting a first and second tumor antigen such as HER2 and HER3 (abbreviated HER2 x HER3), FAP x DR-5 bispecific antibodies, CEA x CD3 bispecific antibodies, CD20 x CD3 bispecific antibodies, EGFR-EDV-miR16 trispecific antibodies, gp100 x CD3 bispecific antibodies, Ny-eso x CD3 bispecific antibodies, EGFR x cMet bispecific antibodies, BCMA x CD3 bispecific antibodies, EGFR-EDV bispecific antibodies, CLEC12A x CD3 bispecific antibodies, HER2 x HER3 bispecific antibodies, Lgr5 x EGFR bispecific antibodies, PD1 x CTLA-4 bispecific antibodies, CD123 x CD3 bispecific antibodies, gpA33 x CD3 bispecific antibodies, B7-H3 x CD3 bispecific antibodies, LAG-3 x PD1 bispecific antibodies, DLL4 x VEGF bispecific antibodies, Cadherin-P x CD3 bispecific antibodies, BCMA x CD3 bispecific antibodies, DLL4 x VEGF bispecific antibodies, CD20 x CD3 bispecific antibodies, Ang-2 x VEGF-A bispecific antibodies,

[0400] CD20 x CD3 bispecific antibodies, CD123 x CD3 bispecific antibodies, SSTR2 X CD3 bispecific antibodies, PD1 x CTLA-4 bispecific antibodies, HER2 x HER2 bispecific antibodies, GPC3 x CD3 bispecific antibodies, PSMA x CD3 bispecific antibodies, LAG-3 x PD-L1 bispecific antibodies, CD38 x CD3 bispecific antibodies, HER2 x CD3 bispecific antibodies, GD2 x CD3 bispecific antibodies, and CD33 x CD3 bispecific antibodies.

[0401] Such therapeutic antibodies may be further conjugated to one or more chemotherapeutic agents (e.g., antibody drug conjugates or ADCs) directly or through a linker, especially acid, base or enzymatically labile linkers.

Combination with Physical Methods

[0402] In some embodiments, a supplementary agent is one or more non-pharmacological modalities (e.g., localized radiation therapy or total body radiation therapy or surgery). By way of example, the present disclosure contemplates treatment regimens wherein a radiation phase is preceded or followed by treatment with a treatment regimen comprising a binding protein and one or more supplementary agents. In some embodiments, the present disclosure further contemplates the use of a binding protein in combination with surgery (e.g. tumor resection). In some embodiments, the present disclosure further contemplates the use of a binding protein in combination with bone marrow transplantation, peripheral blood stem cell transplantation or other types of transplantation therapy.

Combination with Immune Checkpoint Modulators:

[0403] In some embodiments, a “supplementary agent” is an immune checkpoint modulator for the treatment and/or prevention neoplastic disease in a subject as well as diseases, disorders or conditions associated with neoplastic disease. The use of IL10 agents in combination with immune checkpoint modulators in the treatment of neoplastic disease is described in Oft, United States Patent Publication US2020/0353050 published Nov. 12, 2020. The term “immune checkpoint pathway” refers to biological response that is triggered by the binding of a first molecule (e.g. a protein such as PD1) that is expressed on an antigen presenting cell (APC) to a second molecule (e.g. a protein such as PDL1) that is expressed on an immune cell (e.g. a T-cell) which modulates the immune response, either through stimulation (e.g. upregulation of T-cell activity) or inhibition (e.g. downregulation of T-cell activity) of the immune response. The molecules that are involved in the formation of the binding pair that modulate the immune response are commonly referred to as “immune checkpoints.” The biological responses modulated by such immune checkpoint pathways are mediated by intracellular signaling pathways that lead to downstream immune effector pathways, such as cell activation, cytokine production, cell migration, cytotoxic factor secretion, and antibody production. Immune checkpoint pathways are commonly triggered by the binding of a first cell surface expressed molecule to a second cell surface molecule associated with the immune checkpoint pathway (e.g. binding of PD1 to PDL1, CTLA4 to CD28, etc.). The activation of immune checkpoint pathways can lead to stimulation or inhibition of the immune response.

[0404] An immune checkpoint whose activation results in inhibition or downregulation of the immune response is referred to herein as a “negative immune checkpoint pathway modulator.” The inhibition of the immune response resulting from the activation of a negative immune checkpoint modulator diminishes the ability of the host immune system to recognize foreign antigen such as a tumor-associated antigen. The term negative immune checkpoint pathway includes, but is not limited to, biological pathways modulated by the binding of PD1 to PDL1, PD1 to PDL2, and CTLA4 to CDCD80/86. Examples of such negative immune checkpoint antagonists include but are not limited to antagonists (e.g. antagonist antibodies) that bind T-cell inhibitory receptors including but not limited to PD1 (also referred to as CD279), TIM3 (T-cell membrane protein 3; also known as HAVcr2), BTLA (B and T lymphocyte attenuator; also known as CD272), the VISTA (B7-H5) receptor, LAG3 (lymphocyte activation gene 3; also known as CD233) and CTLA4 (cytotoxic T-lymphocyte associated antigen 4; also known as CD152).

[0405] In one embodiment, an immune checkpoint pathway the activation of which results in stimulation of the immune response is referred to herein as a “positive immune checkpoint pathway modulator.” The term positive immune checkpoint pathway modulator includes, but is not limited to, biological pathways modulated by the binding of ICOSL to ICOS(CD278), B7-H6 to NKp30, CD155 to CD96, OX40L to OX40, CD70 to CD27, CD40 to CD40L, and GITRL to GITR. Molecules which agonize positive immune checkpoints (such natural or synthetic ligands for a component of the binding pair that stimulates the immune response) are useful to upregulate the immune response. Examples of such positive immune checkpoint agonists include but are not limited to agonist antibodies that bind T-cell activating receptors such as ICOS (such as JTX-2011, Jounce Therapeutics), OX40 (such as MEDI6383, Medimmune), CD27 (such as varlilumab, Celldex Therapeutics), CD40 (such as dacetuzmumab CP-870,893, Roche, Chi Lob 7/4), HVEM, CD28, CD137 4-1BB, CD226, and GITR (such as MEDI1873, Medimmune; INCAGN1876, Agenus).

[0406] As used herein, the term “immune checkpoint pathway modulator” refers to a molecule that inhibits or stimulates the activity of an immune checkpoint pathway in a biological system including an immunocompetent mammal. An immune checkpoint pathway modulator may exert its effect by binding to an immune checkpoint protein (such as those immune checkpoint proteins expressed on the surface of an antigen presenting cell (APC) such as a cancer cell and/or immune T effector cell) or may exert its effect on upstream and/or downstream reactions in the immune checkpoint pathway. For example, an immune checkpoint pathway modulator may modulate the activity of SHP2, a tyrosine phosphatase that is involved in PD-1 and CTLA-4 signaling. The term “immune checkpoint pathway modulators” encompasses both immune checkpoint pathway modulator(s) capable of down-regulating at least partially the function of an inhibitory immune checkpoint (referred to herein as an “immune checkpoint pathway inhibitor” or “immune checkpoint pathway antagonist”) and immune checkpoint pathway modulator(s) capable of up-regulating at least partially the function of a stimulatory immune checkpoint (referred to herein as an “immune checkpoint pathway effector” or “immune checkpoint pathway agonist.”).

[0407] The immune response mediated by immune checkpoint pathways is not limited to T-cell mediated immune response. For example, the KIR receptors of NK cells modulate the immune response to tumor cells mediated by NK cells. Tumor cells express a molecule called HLA-C, which inhibits the KIR receptors of NK cells leading to a dimunition or the anti-tumor immune response. The administration of an agent that antagonizes the binding of HLA-C to the KIR receptor such an anti-KIR3 mab (e.g. lirilumab, BMS) inhibits the ability of HLA-C to bind the NK cell inhibitory receptor (KIR) thereby restoring the ability of NK cells to detect and attack cancer cells. Thus, the immune response mediated by the binding of HLA-C to the KIR receptor is an example a negative immune checkpoint pathway the inhibition of which results in the activation of a of non-T-cell mediated immune response.

[0408] In one embodiment, the immune checkpoint pathway modulator is a negative immune checkpoint pathway inhibitor/antagonist. In another embodiment, immune checkpoint pathway modulator employed in combination with the binding protein is a positive immune checkpoint pathway agonist. In another embodiment, immune checkpoint pathway modulator employed in combination with the binding protein is an immune checkpoint pathway antagonist.

[0409] The term “negative immune checkpoint pathway inhibitor” refers to an immune checkpoint pathway modulator that interferes with the activation of a negative immune checkpoint pathway resulting in the upregulation or enhancement of the immune response. Exemplary negative immune checkpoint pathway inhibitors include but are not limited to programmed death-1 (PD1) pathway inhibitors, programed death ligand-1 (PDL1) pathway inhibitors, TIM3 pathway inhibitors and anti-cytotoxic T-lymphocyte antigen 4 (CTLA4) pathway inhibitors.

[0410] In one embodiment, the immune checkpoint pathway modulator is an antagonist of a negative immune checkpoint pathway that inhibits the binding of PD1 to PDL1 and/or PDL2 (“PD1 pathway inhibitor”). PD1 pathway inhibitors result in the stimulation of a range of favorable immune response such as reversal of T-cell exhaustion, restoration cytokine production, and expansion of antigen-dependent T-cells. PD1 pathway inhibitors have been recognized as effective variety of cancers receiving approval from the USFDA for the treatment of variety of cancers including melanoma, lung cancer, kidney cancer, Hodgkins lymphoma, head and neck cancer, bladder cancer and urothelial cancer.

[0411] The term PD1 pathway inhibitors includes monoclonal antibodies that interfere with the binding of PD1 to PDL1 and/or PDL2. Antibody PD1 pathway inhibitors are well known in the art. Examples of commercially available PD1 pathway inhibitors that monoclonal antibodies that interfere with the binding of PD1 to PDL1 and/or PDL2 include nivolumab (Opdivo®, BMS-936558, MDX1106, commercially available from BristolMyers Squibb, Princeton NJ), pembrolizumab (Keytruda®MK-3475, lambrolizumab, commercially available from Merck and Company, Kenilworth NJ), and atezolizumab (Tecentriq®, Genentech/Roche, South San Francisco CA). Additional PD1 pathway inhibitors antibodies are in clinical development including but not limited to durvalumab (MEDI4736, Medimmune/AstraZeneca), pidilizumab (CT-011, CureTech), PDR001 (Novartis), BMS-936559 (MDX1105, BristolMyers Squibb), and avelumab (MSB0010718C, Merck Serono/Pfizer) and SHR-1210 (Incyte). Additional antibody PD1 pathway inhibitors are described in U.S. Pat. No. 8,217,149 (Genentech, Inc) issued Jul. 10, 2012; U.S. Pat. No. 8,168,757 (Merck Sharp and Dohme Corp.) issued May 1, 2012, U.S. Pat. No. 8,008,449 (Medarex) issued Aug. 30, 2011, U.S. Pat. No. 7,943,743 (Medarex, Inc) issued May 17, 2011.

[0412] The term PD1 pathway inhibitors are not limited to antagonist antibodies. Non-antibody biologic PD1 pathway inhibitors are also under clinical development including AMP-224, a PD-L2 IgG2a fusion protein, and AMP-514, a PDL2 fusion protein, are under clinical development by Amplimmune and Glaxo SmithKline. Aptamer compounds are also described in the literature useful as PD1 pathway inhibitors (Wang, et al. (2018) 145:125-130.).

[0413] The term PD1 pathway inhibitors includes peptidyl PD1 pathway inhibitors such as those described in Sasikumar, et al., U.S. Pat. No. 9,422,339 issued Aug. 23, 2016, and Sasilkumar, et al., U.S. Pat. No. 8,907,053 issued Dec. 9, 2014. CA-170 (AUPM-170, Aurigene/Curis) is reportedly an orally bioavailable small molecule targeting the immune checkpoints PDL1 and VISTA. Pottayil Sasikumar, et al. Oral immune checkpoint antagonists targeting PD-L1 VISTA or PD-L1/Tim3 for cancer therapy. [abstract]. In: Proceedings of the 107th Annual Meeting of the American Association for Cancer Research; 2016 Apr. 16-20; New Orleans, LA. Philadelphia (PA): AACR; Cancer Res 2016; 76(14 Suppl): Abstract No. 4861. CA-327 (AUPM-327, Aurigene/Curis) is reportedly an orally available, small molecule that inhibit the immune checkpoints, Programmed Death Ligand-1 (PDL1) and T-cell immunoglobulin and mucin domain containing protein-3 (TIM3).

[0414] The term PD1 pathway inhibitors includes small molecule PD1 pathway inhibitors. Examples of small molecule PD1 pathway inhibitors useful in the practice of the present invention are described in the art including Sasikumar, et al., 1,2,4-oxadiazole and thiadiazole compounds as immunomodulators (PCT/IB2016/051266 filed Mar. 7, 2016, published as WO2016142833A1 Sep. 15, 2016) and Sasikumar, et al. 3-substituted-1,2,4-oxadiazole and thiadiazole PCT/IB2016/051343 filed Mar. 9, 2016 and published as WO2016142886A2), BMS-1166 and Chupak LS and Zheng X. Compounds useful as immunomodulators. Bristol-Myers Squibb Co. (2015) WO 2015/034820 A1, EP3041822 B1 granted Aug. 9, 2017; WO2015034820 A1; and Chupak, et al. Compounds useful as immunomodulators. Bristol-Myers Squibb Co. (2015) WO 2015/160641 A2. WO 2015/160641 A2, Chupak, et al. Compounds useful as immunomodulators. Bristol-Myers Squibb Co. Sharpe, et al. Modulators of immunoinhibitory receptor PD-1, and methods of use thereof, WO 2011082400 A2 published Jul. 7, 2011; U.S. Pat. No. 7,488,802 (Wyeth) issued Feb. 10, 2009;

[0415] In some embodiments, combination of binding proteins described herein and one or more PD1 immune checkpoint modulators are useful in the treatment of neoplastic conditions for which PD1 pathway inhibitors have demonstrated clinical effect in human beings either through FDA approval for treatment of the disease or the demonstration of clinical efficacy in clinical trials including but not limited to melanoma, non-small cell lung cancer, small cell lung cancer, head and neck cancer, renal cell cancer, bladder cancer, ovarian cancer, uterine endometrial cancer, uterine cervical cancer, uterine sarcoma, gastric cancer, esophageal cancer, DNA mismatch repair deficient colon cancer, DNA mismatch repair deficient endometrial cancer, hepatocellular carcinoma, breast cancer, Merkel cell carcinoma, thyroid cancer, Hodgkins lymphoma, follicular lymphoma, diffuse large B-cell lymphoma, mycosisfungoides, peripheral T-cell lymphoma. In some embodiments, the combination of binding proteins and an PD1 immune checkpoint modulator is useful in the treatment of tumors characterized by high levels of expression of PDL1, where the tumor has a tumor mutational burden, where there are high levels of CD8⁺ T-cell in the tumor, an immune activation signature associated with IFNγ and the lack of metastatic disease particularly liver metastasis.

[0416] In some embodiments, the binding protein is administered in combination with an antagonist of a negative immune checkpoint pathway that inhibits the binding of CTLA4 to CD28 (“CTLA4 pathway inhibitor”). Examples of CTLA4 pathway inhibitors are well known in the art (See, e.g., U.S. Pat. No. 6,682,736 (Abgenix) issued Jan. 27, 2004; U.S. Pat. No. 6,984,720 (Medarex, Inc.) issued May 29, 2007; U.S. Pat. No. 7,605,238 (Medarex, Inc.) issued Oct. 20, 2009)

[0417] In some embodiments, the binding protein is administered in combination with an antagonist of a negative immune checkpoint pathway that inhibits the binding of BTLA to HVEM (“BTLA pathway inhibitor”). A number of approaches targeting the BTLA/HVEM pathway using anti-BTLA antibodies and antagonistic HVEM-Ig have been evaluated, and such approaches have suggested promising utility in a number of diseases, disorders and conditions, including transplantation, infection, tumor, and autoimmune disease (See e.g. Wu, et al., (2012) Int. J Biol. Sci. 8:1420-30).

[0418] In some embodiments, the binding protein is administered in combination with an antagonist of a negative immune checkpoint pathway that inhibits the ability TIM3 to binding to TIM3-activating ligands (“TIM3 pathway inhibitor”). Examples of TIM3 pathway inhibitors are known in the art and with representative non-limiting examples described in United States Patent Publication No. PCT/US2016/021005 published Sep. 15, 2016; Lifke, et al. United States Patent Publication No. US 20160257749 A1 published Sep. 8, 2016 (F. Hoffman-LaRoche), Karunsky, U.S. Pat. No. 9,631,026 issued Apr. 27, 2017; Karunsky, Sabatos-Peyton, et al. U.S. Pat. No. 8,841,418 isued Sep. 23, 2014; U.S. Pat. No. 9,605,070; Takayanagi, et al., U.S. Pat. No. 8,552,156 issued Oct. 8, 2013.

[0419] In some embodiments, the binding protein is administered in combination with an inhibitor of both LAG3 and PD1 as the blockade of LAG3 and PD1 has been suggested to synergistically reverse anergy among tumor-specific CD8⁺ T-cells and virus-specific CD8⁺ T-cells in the setting of chronic infection. IMP321 (ImmuFact) is being evaluated in melanoma, breast cancer, and renal cell carcinoma. See generally Woo et al., (2012) Cancer Res 72:917-27; Goldberg et al., (2011) Curr. Top. Microbiol. Immunol. 344:269-78; Pardoll (2012) Nature Rev. Cancer 12:252-64; Grosso et al., (2007) J. Clin. Invest. 117:3383-392.

[0420] In some embodiments, the binding protein is administered in combination with an A2aR inhibitor. A2aR inhibits T-cell responses by stimulating CD4⁺ T-cells towards developing into T_{Reg} cells. A2aR is particularly important in tumor immunity because the rate of cell death in tumors from cell turnover is high, and dying cells release adenosine, which is the ligand for A2aR. In addition, deletion of A2aR has been associated with enhanced and sometimes pathological inflammatory responses to infection. Inhibition of A2aR can be effected by the administration of molecules such as antibodies that block adenosine binding or by adenosine analogs. Such agents may be used in combination with the binding proteins for use in the treatment disorders such as cancer and Parkinson's disease.

[0421] In some embodiments, the binding protein is administered in combination with an inhibitor of IDO (Indoleamine 2,3-dioxygenase). IDO down-regulates the immune response mediated through oxidation of tryptophan resulting in in inhibition of T-cell activation and induction of T-cell apoptosis, creating an environment in which tumor-specific cytotoxic T lymphocytes are rendered functionally inactive or are no longer able to attack a subject's cancer cells. Indoximod (NewLink Genetics) is an IDO inhibitor being evaluated in metastatic breast cancer.

[0422] As previously described, the present invention provides for a method of treatment of neoplastic disease (e.g., cancer) in a mammalian subject by the administration of a binding protein in combination with an agent(s) that modulate at least one immune checkpoint pathway including immune checkpoint pathway modulators that modulate two, three or more immune checkpoint pathways.

[0423] In some embodiments the binding protein is administered in combination with an immune checkpoint modulator that is capable of modulating multiple immune checkpoint pathways. Multiple immune checkpoint pathways may be modulated by the administration of multi-functional molecules which are capable of acting as modulators of multiple immune checkpoint pathways. Examples of such multiple immune checkpoint pathway modulators include but are not limited to bi-specific or poly-specific antibodies. Examples of poly-specific antibodies capable of acting as modulators or multiple immune checkpoint pathways are known in the art. For example, United States Patent Publication No. 2013/0156774 describes bispecific and multispecific agents (e.g., antibodies), and methods of their use, for targeting cells that co-express PD1 and TIM3. Moreover, dual blockade of BTLA and PD1 has been shown to enhance antitumor immunity (Pardoll, (April 2012) Nature Rev. Cancer 12:252-64). The present disclosure contemplates the use of binding proteins in combination with immune checkpoint pathway modulators that target multiple immune checkpoint pathways, including but limited to bi-specific antibodies which bind to both PD1 and LAG3. Thus, antitumor immunity can be enhanced at multiple levels, and combinatorial strategies can be generated in view of various mechanistic considerations.

[0424] In some embodiments, the binding protein may be administered in combination with two, three, four or more checkpoint pathway modulators. Such combinations may be advantageous in that immune checkpoint pathways may have distinct mechanisms of action, which provides the opportunity to attack the underlying disease, disorder or conditions from multiple distinct therapeutic angles.

[0425] It should be noted that therapeutic responses to immune checkpoint pathway inhibitors often manifest themselves much later than responses to traditional chemotherapies such as tyrosine kinase inhibitors. In some instance, it can take six months or more after treatment initiation with immune checkpoint pathway inhibitors before objective indicia of a therapeutic response are observed. Therefore, a determination as to whether treatment with an immune checkpoint pathway inhibitors(s) in combination with a binding protein of the present disclosure must be made over a time-to-progression that is frequently longer than with conventional chemotherapies. The desired response can be any result deemed favorable under the circumstances. In some embodiments, the desired response is prevention of the progression of the disease, disorder or condition, while in other embodiments the desired response is a regression or stabilization of one or more characteristics of the disease, disorder or conditions (e.g., reduction in tumor size). In still other embodiments, the desired response is reduction or elimination of one or more adverse effects associated with one or more agents of the combination.

### Cell Therapy Agents and Methods as Supplementary Agents

[0426] In some embodiments, the methods of the disclosure may include the combination of the administration of a binding protein with supplementary agents in the form of cell therapies for the treatment of neoplastic, autoimmune or inflammatory diseases. Examples of cell therapies that are amenable to use in combination with the methods of the present disclosure include but are not limited to engineered T cell products comprising one or more activated CAR-T cells, engineered TCR cells, tumor infiltrating lymphocytes (TILs), engineered Treg cells. As engineered T-cell products are commonly activated ex vivo prior to their administration to the subject and therefore provide upregulated levels of CD25, cell products comprising such activated engineered T cells types are amenable to further support via the administration of a CD25 biased binding protein as described herein.

### CAR-T Cells

[0427] In some embodiments of the methods of the present disclosure, the supplementary agent is a “chimeric antigen receptor T-cell” and “CAR-T cell” are used interchangeably to refer to a T-cell that has been recombinantly modified to express a chimeric antigen receptor. The use of IL10 agents in combination with CAR-T cells for the treatment of neoplastic disease is described in Mumm, et al., U.S. Pat. No. 10,195,274 issued Feb. 5, 2019. As used herein, the terms “chimeric antigen receptor” and “CAR” are used interchangeably to refer to a chimeric polypeptide comprising multiple functional domains arranged from amino to carboxy terminus in the sequence: (a) an antigen binding domain (ABD), (b) a transmembrane domain (TD); and (c) one or more cytoplasmic signaling domains (CSDs) wherein the foregoing domains may optionally be linked by one or more spacer domains. The CAR may also further comprise a signal peptide sequence which is conventionally removed during post-translational processing and presentation of the CAR on the cell surface of a cell transformed with an expression vector comprising a nucleic acid sequence encoding the CAR. CARs useful in the practice of the present invention are prepared in accordance with principles well known in the art. See e.g., Eshhaar et al. U.S. Pat. No. 7,741,465 B1 issued Jun. 22, 2010; Sadelain, et al (2013) Cancer Discovery 3(4):388-398; Jensen and Riddell (2015) Current Opinions in Immunology 33:9-15; Gross, et al. (1989) PNAS(USA) 86(24):10024-10028; Curran, et al. (2012) J Gene Med 14(6):405-15. Examples of commercially available CAR-T cell products that may be modified to incorporate an orthogonal receptor of the present invention include axicabtagene ciloleucel (marketed as Yescarta® commercially available from Gilead Pharmaceuticals) and tisagenlecleucel (marketed as Kymriah® commercially available from Novartis).

[0428] As used herein, the term antigen binding domain (ABD) refers to a polypeptide that specifically binds to an antigen expressed on the surface of a target cell. The ABD may be any polypeptide that specifically binds to one or more cell surface molecules (e.g. tumor antigens) expressed on the surface of a target cell. In some embodiments, the ABD is a polypeptide that specifically binds to a cell surface molecule associated with a tumor cell is selected from the group consisting of GD2, BCMA, CD19, CD33, CD38, CD70, GD2, IL3Rα2, CD19, mesothelin, Her2, EpCam, Mucd, ROR1, CD133, CEA, EGRFRVIII, PSCA, GPC3, Pan-ErbB and FAP. In some embodiments, the ABD is an antibody (as defined hereinabove to include molecules such as one or more VHHs, scFvs, etc.) that specifically binds to at least one cell surface molecule associated with a tumor cell (i.e. at least one tumor antigen) wherein the cell surface molecule associated with a tumor cell is selected from the group consisting of GD2, BCMA, CD19, CD33, CD38, CD70, GD2, IL3Rα2, CD19, mesothelin, Her2, EpCam, Mucd, ROR1, CD133, CEA, EGRFRVIII, PSCA, GPC3, Pan-ErbB and FAP. Examples of CAR-T cells useful as supplementary agents in the practice of the methods of the present disclosure include but are not limited to CAR-T cells expressing CARs comprising an ABD further comprising at least one of: anti-GD2 antibodies, anti-BCMA antibodies, anti-CD19 antibodies, anti-CD33 antibodies, anti-CD38 antibodies, anti-CD70 antibodies, anti-GD2 antibodies and IL3Rα2 antibodies, anti-CD19 antibodies, anti-mesothelin antibodies, anti-Her2 antibodies, anti-EpCam antibodies, anti-Muc antibodies, anti-ROR1 antibodies, anti-CD133 antibodies, anti-CEA antibodies, anti-PSMA antibodies, anti-EGRFRVIII antibodies, anti-PSCA antibodies, anti-GPC3 antibodies, anti-Pan-ErbB antibodies, anti-FAP antibodies,

[0429] CARs of CAR-T cells useful in the practice of the methods of the present disclosure further comprise a transmembrane domain joining the ABD (or linker, if employed, see discussion of linkers below) to the intracellular cytoplasmic domain of the CAR. The transmembrane domain is comprised of any polypeptide sequence which is thermodynamically stable in a eukaryotic cell membrane. The transmembrane spanning domain may be derived from the transmembrane domain of a naturally occurring membrane spanning protein or may be synthetic. In designing synthetic transmembrane domains, amino acids favoring alpha-helical structures are preferred. Transmembrane domains useful in construction of CARs are comprised of approximately 10, 11, 12, 13, 14, 15, 16, 17, 18, 19, 20, 21, 22, 22, 23, or 24 amino acids favoring the formation having an alpha-helical secondary structure. Amino acids having a to favor alpha-helical conformations are well known in the art. See, e.g Pace, et al. (1998) Biophysical Journal 75: 422-427. Amino acids that are particularly favored in alpha helical conformations include methionine, alanine, leucine, glutamate, and lysine. In some embodiments, the CAR transmembrane domain may be derived from the transmembrane domain from type I membrane spanning proteins, such as CD3ζ, CD4, CD8, CD28, etc.

[0430] The cytoplasmic domain of the CAR polypeptide comprises one or more intracellular signal domains. In one embodiment, the intracellular signal domains comprise the cytoplasmic sequences of the T-cell receptor (TCR) and co-receptors that initiate signal transduction following antigen receptor engagement and functional derivatives and sub-fragments thereof. A cytoplasmic signaling domain, such as those derived from the T cell receptor zeta-chain, is employed as part of the CAR in order to produce stimulatory signals for T lymphocyte proliferation and effector function following engagement of the chimeric receptor with the target antigen. Examples of cytoplasmic signaling domains include but are not limited to the cytoplasmic domain of CD27, the cytoplasmic domain S of CD28, the cytoplasmic domain of CD137 (also referred to as 4-1BB and TNFRSF9), the cytoplasmic domain of CD278 (also referred to as ICOS), p110α, β, or δ catalytic subunit of PI3 kinase, the human CD3 ζ-chain, cytoplasmic domain of CD134 (also referred to as OX40 and TNFRSF4), FcεR1γ and β chains, MB1 (Igα) chain, B29 (Igβ) chain, etc.), CD3 polypeptides (δ, Δ and ε), syk family tyrosine kinases (Syk, ZAP 70, etc.), src family tyrosine kinases (Lck, Fyn, Lyn, etc.) and other molecules involved in T-cell transduction, such as CD2, CD5 and CD28.

[0431] In some embodiments, the CAR may also provide a co-stimulatory domain. The term “co-stimulatory domain” (“CSD”) refers to a stimulatory domain, typically an endodomain, of a CAR that provides a secondary non-specific activation mechanism through which a primary specific stimulation is propagated. The co-stimulatory domain refers to the portion of the CAR which enhances the proliferation, survival or development of memory cells. Examples of co-stimulation include antigen nonspecific T cell co-stimulation following antigen specific signaling through the T cell receptor and antigen nonspecific B cell co-stimulation following signaling through the B cell receptor. Co-stimulation, e.g., T cell co-stimulation, and the factors involved are described in Chen & Flies (2013) Nat Rev Immunol 13(4):227-42. In some embodiments of the present disclosure, the CSD comprises one or more of members of the TNFR superfamily, CD28, CD137 (4-1BB), CD134 (OX40), Dap10, CD27, CD2, CD5, ICAM-1, LFA-1 (CD11a/CD18), Lck, TNFR-I, TNFR-II, Fas, CD30, CD40 or combinations thereof.

[0432] CARs useful in the practice of the methods of the present disclosure may optionally include one or more polypeptide spacers linking the domains of the CAR, in particular the linkage between the ABD to the transmembrane spanning domain of the CAR. Although not an essential element of the CAR structure, the inclusion of a spacer domain is generally considered desirable to facilitate antigen recognition by the ARD. As used in conjunction with the CAR-T cell technology described herein, the terms “linker”, “linker domain” and “linker region” refer to a polypeptide from about 1 to 100 amino acids in length. Linkers are typically be composed of amino acid residues which permit flexibility of the polypeptide (e.g. glycine and serine) so that the adjacent domains of the CAR are provided greater freedom of movement relative to one another. Although there is no particularly defined length or sequence of amino acids that is necessary for the spacer to achieve its function, but the typical properties of the spacer are flexibility to enable freedom of movement of the ABD to facilitate targeting antigen recognition. Similarly, it has been found that there is there is substantial leniency in spacer length while retaining CAR function. Jensen and Riddell (2014) Immunol. Review 257(1) 127-144. Sequences useful as spacers in the construction of CARs useful in the practice of the present invention include but are not limited to the hinge region of IgG1, the immunoglobulin 1 CH2-CH3 region, IgG4 hinge-CH2-CH3, IgG4 hinge-CH3, and the IgG4 hinge. The hinge and transmembrane domains may be derived from the same molecule such as the hinge and transmembrane domains of CD8-alpha. Imai, et al. (2004) Leukemia 18(4):676-684.

[0433] CARs are often referred to as first, second, third or fourth generation. The term first-generation CAR refers to a CAR wherein the cytoplasmic domain transmits the signal from antigen binding through only a single signaling domain, for example a signaling domain derived from the high-affinity receptor for IgE FcεR1γ or the CD3 chain. The domain contains one or three immunoreceptor tyrosine-based activating motif(s) [ITAM(s)] for antigen-dependent T-cell activation. The ITAM-based activating signal endows T-cells with the ability to lyse the target tumor cells and secret cytokines in response to antigen binding. Second-generation CARs include a co-stimulatory signal in addition to the CD3 (signal. Coincidental delivery of the co-stimulatory signal enhances cytokine secretion and antitumor activity induced by CAR-transduced T-cells. The co-stimulatory domain is usually be membrane proximal relative to the CD3ζ domain. Third-generation CARs include a tripartite signaling domain, comprising for example a CD28, CD3, OX40 or 4-1BB signaling region. In fourth generation, or “armored car” CAR T-cells are further modified to express or block molecules and/or receptors to enhance immune activity such as the expression of IL12, IL18, IL7, and/or IL10; 4-1BB ligand, CD-40 ligand. Examples of intracellular signaling domains comprising may be incorporated into the CAR of the present invention include (amino to carboxy): CD3ζ; CD28-41BB-CD3ζ; CD28-OX40-CD3ζ; CD28-41BB-CD3ζ; 41BB-CD-28-CD3ζ and 41BB-CD3ζ.

[0434] The term CAR includes CAR variants including but not limited split CARs, ON-switch CARS, bispecific or tandem CARs, inhibitory CARs (iCARs) and induced pluripotent stem (iPS) CAR-T cells. The term “Split CARs” refers to CARs wherein the extracellular portion, the ABD and the cytoplasmic signaling domain of a CAR are present on two separate molecules. CAR variants also include ON-switch CARs which are conditionally activatable CARs, e.g., comprising a split CAR wherein conditional hetero-dimerization of the two portions of the split CAR is pharmacologically controlled. CAR molecules and derivatives thereof (i.e., CAR variants) are described, e.g., in PCT Application Nos. US2014/016527, US1996/017060, US2013/063083; Fedorov et al. Sci Transl Med (2013); 5(215):215ra172; Glienke et al. Front Pharmacol (2015) 6:21; Kakarla & Gottschalk 52 Cancer J (2014) 20(2):151-5; Riddell et al. Cancer J (2014) 20(2):141-4; Pegram et al. Cancer J (2014) 20(2):127-33; Cheadle et al. Immunol Rev (2014) 257(1):91-106; Barrett et al. Annu Rev Med (2014) 65:333-47; Sadelain et al. Cancer Discov (2013) 3(4):388-98; Cartellieri et al., J Biomed Biotechnol (2010) 956304; the disclosures of which are incorporated herein by reference in their entirety. The term “bispecific or tandem CARs” refers to CARs which include a secondary CAR binding domain that can either amplify or inhibit the activity of a primary CAR. The term “inhibitory chimeric antigen receptors” or “iCARs” are used interchangeably herein to refer to a CAR where binding iCARs use the dual antigen targeting to shut down the activation of an active CAR through the engagement of a second suppressive receptor equipped with inhibitory signaling domains of a secondary CAR binding domain results in inhibition of primary CAR activation. Inhibitory CARs (iCARs) are designed to regulate CAR-T cells activity through inhibitory receptors signaling modules activation. This approach combines the activity of two CARs, one of which generates dominant negative signals limiting the responses of CAR-T cells activated by the activating receptor. iCARs can switch off the response of the counteracting activator CAR when bound to a specific antigen expressed only by normal tissues. In this way, iCARs-T cells can distinguish cancer cells from healthy ones, and reversibly block functionalities of transduced T cells in an antigen-selective fashion. CTLA-4 or PD-1 intracellular domains in iCARs trigger inhibitory signals on T lymphocytes, leading to less cytokine production, less efficient target cell lysis, and altered lymphocyte motility. The term “tandem CAR” or “TanCAR” refers to CARs which mediate bispecific activation of T cells through the engagement of two chimeric receptors designed to deliver stimulatory or costimulatory signals in response to an independent engagement of two different tumor associated antigens.

[0435] Typically, the chimeric antigen receptor T-cells (CAR-T cells) are T-cells which have been recombinantly modified by transduction with an expression vector encoding a CAR in substantial accordance with the teaching above.

[0436] In some embodiments, the engineered T cell is allogeneic with respect to the individual that is treated. Graham et al. (2018) Cell 7(10) E155. In some embodiments an allogeneic engineered T cell is fully HLA matched. However not all patients have a fully matched donor and a cellular product suitable for all patients independent of HLA type provides an alternative.

[0437] Because the cell product may consist of a subject's own T-cells, the population of the cells to be administered is to the subject is necessarily variable. Consequently, identifying the optimal concentration of the CAR-T cell will be optimized by the caregiver in accordance with the needs of the subject to be treated and monitored by conventional laboratory testing. Additionally, since the CAR-T cell agent is variable, the response to such agents can vary and thus involves the ongoing monitoring and management of therapy related toxicities which are managed with a course of pharmacologic immunosuppression or B cell depletion prior to the administration of the CAR-T cell treatment. Usually, at least 1×10⁶ cells/kg will be administered, at least 1×10⁷ cells/kg, at least 1×10⁸ cells/kg, at least 1×10⁹ cells/kg, at least 1×10¹⁰ cells/kg, or more, usually being limited by the number of T cells that are obtained during collection. The engineered cells may be infused to the subject in any physiologically acceptable medium by any convenient route of administration, normally intravascularly, although they may also be introduced by other routes, where the cells may find an appropriate site for growth

[0438] If the T cells used in the practice of the present invention are allogeneic T cells, such cells may be modified to reduce graft versus host disease. For example, the engineered cells of the present invention may be TCRαβ receptor knock-outs achieved by gene editing techniques. TCRαβ is a heterodimer and both alpha and beta chains need to be present for it to be expressed. A single gene codes for the alpha chain (TRAC), whereas there are 2 genes coding for the beta chain, therefore TRAC loci KO has been deleted for this purpose. A number of different approaches have been used to accomplish this deletion, e.g. CRISPR/Cas9; meganuclease; engineered I-Crel homing endonuclease, etc. See, for example, Eyquem et al. (2017) Nature 543:113-117, in which the TRAC coding sequence is replaced by a CAR coding sequence; and Georgiadis et al. (2018) Mol. Ther. 26:1215-1227, which linked CAR expression with TRAC disruption by clustered regularly interspaced short palindromic repeats (CRISPR)/Cas9 without directly incorporating the CAR into the TRAC loci. An alternative strategy to prevent GVHD modifies T cells to express an inhibitor of TCRαβ signaling, for example using a truncated form of CD3ζ as a TCR inhibitory molecule.

### Chemokine and Cytokine Agents as Supplementary Agents:

[0439] In some embodiments the binding protein is administered in combination with additional cytokines including but not limited to IL2, IL7, IL12, IL15 (See U.S. Pat. No. 10,398,761 issued Sep. 13, 2019) and IL18 including analogs and variants of each thereof.

### Activation-Induced Cell Death Inhibitors

[0440] In some embodiments the binding protein is administered in combination with one or more supplementary agents that inhibit Activation-Induced Cell Death (AICD). AICD is a form of programmed cell death resulting from the interaction of Fas receptors (e.g., Fas, CD95) with Fas ligands (e.g., FasL, CD95 ligand), helps to maintain peripheral immune tolerance. The AICD effector cell expresses FasL, and apoptosis is induced in the cell expressing the Fas receptor. Activation-induced cell death is a negative regulator of activated T lymphocytes resulting from repeated stimulation of their T-cell receptors. Examples of agents that inhibit AICD that may be used in combination with the binding proteins described herein include but are not limited to cyclosporin A (Shih, et al., (1989) Nature 339:625-626, IL16 and analogs (including rhIL16, Idziorek, et al., (1998) Clinical and Experimental Immunology 112:84-91), TGFb1 (Genesteir, et al., (1999) J Exp Med 189(2): 231-239), and vitamin E (Li-Weber, et al., (2002) J Clin Investigation 110(5):681-690).

### Physical Methods

[0441] In some embodiments, the supplementary agent is an anti-neoplastic physical methods including but not limited to radiotherapy, cryotherapy, hyperthermic therapy, surgery, laser ablation, and proton therapy.

### Immune Diseases

[0442] The present disclosure further provides methods of treating a subject suffering from a disease, disorder, or condition by the administration of a therapeutically effective amount of an IL10Rα/IL2Rγ binding protein (or nucleic acid encoding an IL10Rα/IL2Rγ binding protein including recombinant viruses encoding the IL10Rα/IL2Rγ binding protein) of the present disclosure. Disorders amenable to treatment with IL10Rα/IL2Rγ binding proteins (including pharmaceutically acceptable formulations comprising IL10Rα/IL2Rγ binding proteins and/or the nucleic acid molecules that encode them including recombinant viruses encoding such IL10Rα/IL2Rγ binding proteins) of the present disclosure include inflammatory or autoimmune diseases including but not limited to, viral infections (e.g., AIDS, influenza, chronic HCV, chronic viral hepatitis B, C or D), Heliobacter pylori infection, HTLV, organ rejection, graft versus host disease, autoimmune thyroid disease, multiple sclerosis, allergy, asthma, neurodegenerative diseases including Alzheimer's disease, systemic lupus erythramatosis (SLE), autoinflammatory diseases, inflammatory bowel disease (IBD), Crohn's disease, diabetes including Type 1 or type 2 diabetes, inflammation, autoimmune disease, atopic diseases, paraneoplastic autoimmune diseases, cartilage inflammation, arthritis, rheumatoid arthritis, juvenile arthritis, juvenile rheumatoid arthritis, juvenile rheumatoid arthritis, polyarticular juvenile rheumatoid arthritis, systemic onset juvenile rheumatoid arthritis, juvenile ankylosing spondylitis, juvenile enteropathic arthritis, juvenile reactive arthritis, juvenile Reiter's Syndrome, SEA Syndrome (Seronegativity Enthesopathy Arthropathy Syndrome), juvenile dermatomyositis, juvenile psoriatic arthritis, juvenile scleroderma, juvenile systemic lupus erythematosus, juvenile vasculitis, pauciarticular rheumatoidarthritis, polyarticular rheumatoidarthritis, systemic onset rheumatoidarthritis, ankylosing spondylitis, enteropathic arthritis, reactive arthritis, Reiter's syndrome, SEA Syndrome (Seronegativity, Enthesopathy, Arthropathy Syndrome). In certain embodiments, the method does not cause anemia.

[0443] Other examples of proliferative and/or differentiative disorders amenable to treatment with IL10Rα/IL2Rγ binding proteins (including pharmaceutically acceptable formulations comprising IL10Rα/IL2Rγ binding proteins and/or the nucleic acid molecules that encode them including recombinant viruses encoding such IL10Rα/IL2Rγ binding proteins) of the present disclosure include, but are not limited to, skin disorders. The skin disorder may involve the aberrant activity of a cell or a group of cells or layers in the dermal, epidermal, or hypodermal layer, or an abnormality in the dermal-epidermal junction. For example, the skin disorder may involve aberrant activity of keratinocytes (e.g., hyperproliferative basal and immediately suprabasal keratinocytes), melanocytes, Langerhans cells, Merkel cells, immune cell, and other cells found in one or more of the epidermal layers, e.g., the stratum basale (stratum germinativum), stratum spinosum, stratum granulosum, stratum lucidum or stratum corneum. In other embodiments, the disorder may involve aberrant activity of a dermal cell, for example, a dermal endothelial, fibroblast, immune cell (e.g., mast cell or macrophage) found in a dermal layer, for example, the papillary layer or the reticular layer.

[0444] Examples of skin disorders include psoriasis, psoriatic arthritis, dermatitis (eczema), for example, exfoliative dermatitis or atopic dermatitis, pityriasis rubra pilaris, pityriasis rosacea, parapsoriasis, pityriasis lichenoiders, lichen planus, lichen nitidus, ichthyosiform dermatosis, keratodermas, dermatosis, alopecia areata, pyoderma gangrenosum, vitiligo, pemphigoid (e.g., ocular cicatricial pemphigoid or bullous pemphigoid), urticaria, prokeratosis, rheumatoid arthritis that involves hyperproliferation and inflammation of epithelial-related cells lining the joint capsule; dermatitises such as seborrheic dermatitis and solar dermatitis; keratoses such as seborrheic keratosis, senile keratosis, actinic keratosis, photo-induced keratosis, and keratosis follicularis; acne vulgaris; keloids and prophylaxis against keloid formation; nevi; warts including verruca, condyloma or condyloma acuminatum, and human papilloma viral (HPV) infections such as venereal warts; leukoplakia; lichen planus; and keratitis. The skin disorder can be dermatitis, e.g., atopic dermatitis or allergic dermatitis, or psoriasis.

[0445] The compositions of the present disclosure (including pharmaceutically acceptable formulations comprising IL10Rα/IL2Rγ binding proteins and/or the nucleic acid molecules that encode them including recombinant viruses encoding such IL10Rα/IL2Rγ binding proteins) can also be administered to a patient who is suffering from (or may suffer from) psoriasis or psoriatic disorders. The term “psoriasis” is intended to have its medical meaning, namely, a disease which afflicts primarily the skin and produces raised, thickened, scaling, nonscarring lesions. The lesions are usually sharply demarcated erythematous papules covered with overlapping shiny scales. The scales are typically silvery or slightly opalescent. Involvement of the nails frequently occurs resulting in pitting, separation of the nail, thickening and discoloration. Psoriasis is sometimes associated with arthritis, and it may be crippling. Hyperproliferation of keratinocytes is a key feature of psoriatic epidermal hyperplasia along with epidermal inflammation and reduced differentiation of keratinocytes. Multiple mechanisms have been invoked to explain the keratinocyte hyperproliferation that characterizes psoriasis. Disordered cellular immunity has also been implicated in the pathogenesis of psoriasis. Examples of psoriatic disorders include chronic stationary psoriasis, plaque psoriasis, moderate to severe plaque psoriasis, psoriasis vulgaris, eruptive psoriasis, psoriatic erythroderma, generalized pustular psoriasis, annular pustular psoriasis, or localized pustular psoriasis.

Combination of IL10Rα/IL2Rγ Binding Proteins with Additional Therapeutic Agents for Autoimmune Disease:

[0446] The present disclosure provides the for the use of the IL10Rα/IL2Rγ binding proteins of the present disclosure in combination with one or more additional active agents (“supplementary agents”) in the treatment of autoimmune disease. As used herein, the term “supplementary agents” includes agents that can be administered or introduced separately, for example, formulated separately for separate administration (e.g., as may be provided in a kit) and/or therapies that can be administered or introduced in combination with the IL10Rα/IL2Rγ binding proteins.

[0447] As used herein, the term “in combination with” when used in reference to the administration of multiple agents to a subject refers to the administration of a first agent at least one additional (i.e., second, third, fourth, fifth, etc.) agent to a subject. For purposes of the present invention, one agent (e.g., IL10Rα/IL2Rγ binding protein) is considered to be administered in combination with a second agent (e.g. a therapeutic autoimmune antibody such as Humira®) if the biological effect resulting from the administration of the first agent persists in the subject at the time of administration of the second agent such that the therapeutic effects of the first agent and second agent overlap. For example, the therapeutic antibodies are sometimes administered by IV infusion every two weeks (e.g. adalimumab in the treatment of Crohn's disease) while the IL10Rα/IL2Rγ binding proteins of the present disclosure may be administered more frequently, e.g. daily, BID, or weekly. However, the administration of the first agent (e.g. entaercept) provides a therapeutic effect over an extended time and the administration of the second agent (e.g. an IL10Rα/IL2Rγ binding protein) provides its therapeutic effect while the therapeutic effect of the first agent remains ongoing such that the second agent is considered to be administered in combination with the first agent, even though the first agent may have been administered at a point in time significantly distant (e.g. days or weeks) from the time of administration of the second agent. In one embodiment, one agent is considered to be administered in combination with a second agent if the first and second agents are administered simultaneously (within 30 minutes of each other), contemporaneously or sequentially. In some embodiments, a first agent is deemed to be administered “contemporaneously” with a second agent if first and second agents are administered within about 24 hours of each another, preferably within about 12 hours of each other, preferably within about 6 hours of each other, preferably within about 2 hours of each other, or preferably within about 30 minutes of each other. The term “in combination with” shall also understood to apply to the situation where a first agent and a second agent are co-formulated in single pharmaceutically acceptable formulation and the co-formulation is administered to a subject. In certain embodiments, the IL10Rα/IL2Rγ binding protein and the supplementary agent(s) are administered or applied sequentially, e.g., where one agent is administered prior to one or more other agents. In other embodiments, the IL10Rα/IL2Rγ binding protein and the supplementary agent(s) are administered simultaneously, e.g., where two or more agents are administered at or about the same time; the two or more agents may be present in two or more separate formulations or combined into a single formulation (i.e., a co-formulation). Regardless of whether the agents are administered sequentially or simultaneously, they are considered to be administered in combination for purposes of the present disclosure.

[0448] In some embodiments, the supplementary agent is one or more agents selected from the group consisting of corticosteroids (including but not limited to prednisone, budesonide, prednilisone), Janus kinase inhibitors (including but not limited to tofacitinib (Xeljanz®), calcineurin inhibitors (including but not limited to cyclosporine and tacrolimus), mTor inhibitors (including but not limited to sirolimus and everolimus), IMDH inhibitors (including but not limited to azathioprine, leflunomide and mycophenolate), biologics such as abatcept (Orencia®) or etanercept (Enbrel®), and therapeutic antibodies. Examples of therapeutic antibodies that may be administered as supplementary agents in combination with the IL10Rα/IL2Rγ binding proteins of the present disclosure in the treatment of autoimmune disease include but are not limited to anti-CD25 antibodies (e.g. daclizumab and basiliximab), anti-VLA-4 antibodies (e.g. natalizumab), anti-CD52 antibodies (e.g. alemtuzumab), anti-CD20 antibodies (e.g. rituximab, ocrelizumab), anti-TNF antibodies (e.g. infliximab, and adalimumab), anti-IL6R antibodies (e.g. tocilizumab), anti-TNFα antibodies (e.g. adalimumab (Humira®), golimumab, and infliximab), anti-integrin-α4β7 antibodies (e.g. vedolizumab), anti-IL17a antibodies (e.g. brodalumab or secukinumab), anti-IL4Rα antibodies (e.g. dupilumab), anti-RANKL antibodies, IL6R antibodies, anti-IL1β antibodies (e.g. canakinumab), anti-CD11a antibodies (e.g. efalizumab), anti-CD3 antibodies (e.g. muramonab), anti-IL5 antibodies (e.g. mepolizumab, reslizumab), anti-BLyS antibodies (e.g. belimumab); and anti-IL12/IL23 antibodies (e.g ustekinumab).

[0449] Many therapeutic antibodies have been approved for clinical use against autoimmune disease. Examples of antibodies approved by the United States Food and Drug Administration (FDA) for use in the treatment of autoimmune diseases in a subject suffering therefrom that may be administered as supplementary agents in combination with the IL10Ra/IL2Rγ binding proteins of the present disclosure (and optionally additional supplementary agents) for the treatment of the indicated autoimmune disease are provided in Table 6.

TABLE 6

| Name | Target | Indication |
|---|---|---|
| belimumab | BLyS | Systemic lupus erythematosus |
| efalizumab | CD11a | Psoriasis |
| ocrelizumab | CD20 | Multiple sclerosis |
| rituximab | CD20 | Multiple sclerosis |
| basiliximab | CD25 | Transplantation rejection |
| daclizumab | CD25 | Transplantation rejection |
| muromonab | CD3 | Transplantation rejection |
| alemtuzumab | CD52 | Multiple sclerosis |
| omalizumab | IgE | Asthma |
| ustekinumab | IL12/IL23 | Plaque psoriasis |
| brodalumab | IL17a | Psoriasis, psoriatic arthritis, ankylosing spondylitis |
| secukinumab | IL17a | Psoriasis, psoriatic arthritis, ankylosing spondylitis |
| ixekizumab | IL17a | Psoriasis, psoriatic arthritis, ankylosing spondylitis |
| canakinumab | IL1ß | Cryopyrin-associated periodic syndrome, tumor necrosis factor |
| | | receptor associated periodic syndrome, hyperimmunoglobulin D |
| | | syndrome, mevalonate kinase deficiency, familial Mediterranean |
| | | fever, rheumatoid arthritis |
| dupilumab | IL4Rα | Asthma, dermatitis |
| mepolizumab | IL5 | Asthma |
| reslizumab | IL5 | Asthma |
| tocilizumab | IL6R | Rheumatoid arthritis |
| vedolizumab | Integrin-α4β7 | Ulcerative colitis, Crohn's disease |
| denosumab | RANKL | Osteoporosis |
| certolizumab | TNFa | Chron's disease, rheumatoid arthritis |
| golimumab | TNFa | Rheumatoid arthritis, psoriatic arthritis, ankylosing spondylitis |
| adalimumab | TNFα | Rheumatoid arthritis, juvenile idiopathic arthritis, psoriatic |
| | | arthritis, ankylosing spondylitis, Crohn's disease, plaque |
| | | psoriasis |
| infliximab | TNFα | Crohn's disease, ulcerative colitis, rheumatoid arthritis, |
| | | ankylosing spondylitis, psoriatic arthritis, plaque psoriasis |
| ranibizumab | VEGF-A | Neovascular age-related macular degeneration, macular edema |
| natalizumab | VLA-4 | Multiple sclerosis, relapsing rultiple sclerosis, Crohn's disease |

[0450] The foregoing antibodies useful as supplementary agents in the practice of the methods of the present disclosure may be administered alone or in the form of any antibody drug conjugate (ADC) comprising the antibody, linker, and one or more drugs (e.g. 1, 2, 3, 4, 5, 6, 7, or 8 drugs) or in modified form (e.g. PEGylated).

[0451] In some embodiments the supplementary agent is a vaccine. The IL10Rα/IL2Rγ binding proteins of the present invention may be administered to a subject in combination with vaccines as an adjuvant to enhance the immune response to the vaccine in accordance with the teaching of Doyle, et al U.S. Pat. No. 5,800,819 issued Sep. 1, 1998. Examples of vaccines that may be combined with the IL10Rα/IL2Rγ binding proteins of the present invention include are HSV vaccines, Bordetella pertussis, Escherichia coli vaccines, pneumococcal vaccines including multivalent pneumococcal vaccines such as Prevnar® 13, diptheria, tetanus and pertussis vaccines (including combination vaccines such as Pediatrix®) and Pentacel®), varicella vaccines, Haemophilus influenzae type B vaccines, human papilloma virus vaccines such as Gardasil®, polio vaccines, Leptospirosis vaccines, combination respiratory vaccine, Moraxella vaccines, and attenuated live or killed virus vaccine products such as bovine respiratory disease vaccine (RSV), multivalent human influenza vaccines such as Fluzone® and Quadravlent Fluzone®), feline leukemia vaccine, transmissible gastroenteritis vaccine, COVID-19 vaccine, and rabies vaccine.

### Selective Activation

[0452] It is known that IL10 has activities on macrophages (e.g., monocytes) and T cells (e.g., CD4⁺ T cells and CD8⁺ T cells). In some embodiments, the method provided herein uses a binding protein of the present disclosure that binds to IL10Rα and IL2Rγ resulting in the selective activation of T cells relative to activation of macrophages. Macrophages is a cell type that expresses both IL10Rα and IL10Rβ receptors but when activated too potently can cause side effects such as anemia. The selective activation of T cells relative to macrophages is beneficial because IL10-activated macrophages can phagocytose aging red blood cells, which manifests itself as anemia in a patient receiving IL10. Binding proteins as described herein that provide for the selective substantial activation of T cells while providing a minimal activation of macrophages can result in a molecule that produces lower side effects, such as anemia, relative to the native IL10 ligand. Other problems and toxicities related to IL10 activation are described in, e.g., Fioranelli and Grazia, J Integr Cardiol 1(1):2-6, 2014. Such problems can be avoided by using a binding protein of the present disclosure that specifically binds to IL10Rα and IL2Rγ.

[0453] In some embodiments, provided herein are methods to selectively induce activity in one or more of a first cell type over one or more of a second cell type by contacting a population of cells comprising both the first and second cell types with an IL10Rα/IL2Rγ binding protein described herein. In particular embodiments, the first cell type is CD4⁺ T cells, CD8⁺ T cells, B cells, and/or NK cells and the second cell type is monocytes. In other embodiments, the first cell type is CD4⁺ T cells and/or CD8⁺ T cells and the second cell type is NK cells, B cells, and/or monocytes. In certain embodiments, the activity of the first cell type induced by an IL10Rα/IL2Rγ is at least 1.2 fold more than the activity of the second cell type.

### Dosage

[0454] Dosage, toxicity and therapeutic efficacy of such binding proteins or nucleic acids compounds can be determined by standard pharmaceutical procedures in cell cultures or experimental animals. The data obtained from the cell culture assays and animal studies can be used in formulating a range of dosage for use in humans. The dosage of such compounds lies preferably within a range of circulating concentrations that include the ED50 with minimal acceptable toxicity. The dosage may vary within this range depending upon the dosage form employed and the route of administration utilized. For any compound used in the method of the invention, the therapeutically effective dose can be estimated initially from cell culture assays. A dose may be formulated in animal models to achieve a circulating plasma concentration range that includes the IC50 as determined in cell culture. Such information can be used to more accurately determine useful doses in humans. Levels in plasma may be measured, for example, by high performance liquid chromatography.

[0455] As defined herein, a therapeutically effective amount of a subject binding protein (i.e., an effective dosage) depends on the polypeptide selected. For instance, single dose amounts in the range of approximately 0.001 to 0.1 mg/kg of patient body weight can be administered; in some embodiments, about 0.005, 0.01, 0.05 mg/kg may be administered.

[0456] In some embodiments, the pharmaceutically acceptable forms of the binding proteins of the present disclosure are administered to a subject in accordance with a “low-dose” treatment protocol as described in Klatzman, et al. U.S. Pat. Nos. 9,669,071 and 10,293,028B2 the entire teachings of which are herein incorporated by reference. Additional low dose protocols are described in Smith, K. A. (1993) Blood 81(6):1414-1423, He, et al., (2016) Nature Medicine 22(9): 991-993

[0457] In some embodiments of the present disclosure provides methods and compositions for the treatment and/or prevention of neoplastic diseases, disorders or conditions in a subject by the administration to the subject a therapeutically effective amount of a binding protein of the present disclosure wherein the serum concentration of is maintained for a majority (i.e., greater than about 50% of the period of time, alternatively greater than about 60%, alternatively greater than about 70%, alternatively greater than about 80%, alternatively greater than about 90%) of a period of time (e.g. at least 24 hours, alternatively at least 48 hours, alternatively at least 72 hours, alternatively at least 96 hours, alternatively at least 120 hours, alternatively at least 144 hours, alternatively at least 7 days, alternatively at least 10 days, alternatively at least 12 days, alternatively at least 14 days, alternatively at least 28 days, alternatively at least 45 days, alternatively at least 60 days, or longer) at a serum concentration at or above the effective concentration of the binding protein sufficient to promote proliferation of CD3-activated primary human T-cells (e.g., at or above EC₃₀^{PRO}, alternatively at or above EC₂₀^{PRO}, alternatively at or above EC₃₀^{PRO}, alternatively at or above EC₄₀^{PRO}, at or above EC₅₀^{PRO}, alternatively at or above EC₆₀^{PRO}) with respect to such binding protein but at a serum concentration at or below of the effective concentration at a serum concentration of such binding protein sufficient to induce activation of T-cells (e.g., at or below EC₁₀₀^{PRO}, alternatively at or below EC₉₀^{PRO}, alternatively at or below EC₈₀^{PRO}, alternatively at or below EC₇₀^{PRO}, at or below EC₆₀^{PRO}, alternatively at or below EC₅₀^{PRO}) with respect to such binding protein.

[0458] In some embodiments of the present disclosure provides methods and compositions for the treatment and/or prevention of neoplastic diseases, disorders or conditions in a subject by the administration to the subject a therapeutically effective amount of a binding protein described herein sufficient to maintain a serum concentration of the binding protein for more than about 50%, alternatively greater than about 60%, alternatively greater than about 70%, alternatively greater than about 80%, alternatively greater than about 90%) of a period of time of at least 24 hours, alternatively at least 96 hours, alternatively at least 120 hours, alternatively at least 144 hours, alternatively at least 7 days, alternatively at least 10 days, alternatively at least 12 days, alternatively at least 14 days, alternatively at least 28 days, alternatively at least 45 days, alternatively at least 60 days, or longer.

[0459] In some embodiments of the present disclosure provides methods and compositions for the treatment and/or prevention of neoplastic diseases, disorders or conditions in a subject by the administration to the subject a therapeutically effective amount of a binding protein sufficient to maintain a serum concentration of the binding protein at or above the effective concentration for more than about 50%, alternatively greater than about 60%, alternatively greater than about 70%, alternatively greater than about 80%, alternatively greater than about 90%) of a period of time of at least 24 hours, alternatively at least 96 hours, alternatively at least 120 hours, alternatively at least 144 hours, alternatively at least 7 days, alternatively at least 10 days, alternatively at least 12 days, alternatively at least 14 days, alternatively at least 28 days, alternatively at least 45 days, alternatively at least 60 days, or longer.

[0460] In accordance with another aspect, there is provided a method for stimulating the immune system of an animal by administering the binding proteins of the present disclosure. The method is useful to treat disease states where the host immune response is deficient. In treating a subject, a therapeutically effective dose of compound (i.e., active ingredient) is administered. A therapeutically effective dose refers to that amount of the active ingredient that produces amelioration of symptoms or a prolongation of survival of a subject. An effective dose will vary with the characteristics of the binding protein to be administered, the physical characteristics of the subject to be treated, the nature of the disease or condition, and the like. A single administration can range from about 50,000 IU/kg to about 1,000,000 IU/kg or more, more typically about 600,000 IU/kg. This may be repeated several times a day (e.g., 2-3 times per day) for several days (e.g., about 3-5 consecutive days) and then may be repeated one or more times following a period of rest (e.g., about 7-14 days). Thus, an effective dose may comprise only a single administration or many administrations over a period of time (e.g., about 20-30 individual administrations of about 600,000 IU/kg each given over about a 10-20 day period).

[0461] The compositions can be administered one from one or more times per day to one or more times per week; including once every other day. The skilled artisan will appreciate that certain factors may influence the dosage and timing required to effectively treat a subject, including but not limited to the severity of the disease or disorder, previous treatments, the general health and/or age of the subject, and other diseases present. Moreover, treatment of a subject with a therapeutically effective amount of the binding proteins can include a single treatment or, can include a series of treatments. In one embodiment, the compositions are administered every 8 hours for five days, followed by a rest period of 2 to 14 days, e.g., 9 days, followed by an additional five days of administration every 8 hours. In another embodiment, the compositions are administered every other day for a period of at least 6 days, optionally at least 10 days, optionally at least 14 days, optionally at least 30 days, optionally at least 60 days.

[0462] The pharmaceutical compositions can be included in a container, pack, or dispenser together with instructions for administration.

[0463] While compounds that exhibit toxic side effects may be used, care should be taken to design a delivery system that targets such compounds to the site of affected tissue in order to minimize potential damage to uninfected cells and, thereby, reduce side effects. Toxicity and therapeutic efficacy of a binding protein can be determined by standard pharmaceutical procedures in cell culture or experimental animals. Cell culture assays and animal studies can be used to determine the LD₅₀ (the dose lethal to 50% of a population) and the ED₅₀ (the dose therapeutically effective in 50% of a population). The dose ratio between toxic and therapeutic effects is the therapeutic index, which can be expressed as the ratio LC₅₀/EC₅₀. Binding proteins that exhibit large therapeutic indices are preferred. The data obtained from these cell culture assays and animal studies can be used in formulating a range of dosages suitable for use in humans. The dosage of such mutants lies preferably within a range of circulating concentrations that include the ED₅₀ with little or no toxicity. The dosage may vary within this range depending upon a variety of factors, e.g., the dosage form employed, the route of administration utilized, the condition of the subject, and the like.

[0464] A therapeutically effective dose can be estimated initially from cell culture assays by determining an EC₅₀. A dose can then be formulated in animal models to achieve a circulating plasma concentration range that includes the EC₅₀ as determined in cell culture. Such information can be used to more accurately determine useful doses in humans. Levels in plasma may be measured, for example, by HPLC. The exact formulation, route of administration and dosage can be chosen by the individual physician in view of the patient's condition.

[0465] The attending physician for patients treated with binding proteins of the present disclosure would know how and when to terminate, interrupt, or adjust administration due to toxicity, organ dysfunction, and the like. Conversely, the attending physician would also know to adjust treatment to higher levels if the clinical response were not adequate (precluding toxicity). The magnitude of an administered dose in the management of the disorder of interest will vary with the severity of the condition to be treated, with the route of administration, and the like. The severity of the condition may, for example, be evaluated, in part, by standard prognostic evaluation methods. Further, the dose and perhaps dose frequency will also vary according to the age, body weight, and response of the individual patient.

### EXAMPLES

### Example 1—pSTAT3 Flow Cytometric Assay

[0466] PBMCs were purified from healthy non-smoking donor blood collected in Leukoreduction system chambers using the human Miltenyi MACSprep PBMC isolation kit. The purified PBMCs (500,000 cells per well) were either left unstimulated or were stimulated with 100 nM concentration of WT IL10 or one of the 84 anti-IL10R1/IL2Rγ V_{H}H² for 20 min at 37° C. The cells were fixed with Fix Buffer I (commercially available from BD Biosciences, San Jose CA as Cat #557870) for 15 mins at 37° C. The cells were then washed and permeabilized with chilled Perm Buffer III (commercially available from BD Biosciences, Catalog #558050) overnight at −20° C. The cells were washed to remove the permeabilization buffer and blocked with Human TruStain FcX (commercially available from BioLegend, San Diego CA as catalog number 422301) and mouse serum for 5 minutes at room temperature. The cells were then treated with the antibody cocktail (Table 7 below) for 1 hour at room temperature. Following antibody staining, the cells were washed, fixed and ran on the Cytek® Aurora Spectral flow cytometer (commercially available from Cytek Biosciences, Fremont CA). The data was analyzed using the FlowJo software (commercially available from Becton Dickinson Corp, Franklin Lakes, NJ). The various cell lineages were gated using their lineage markers and the geometric mean fluorescence intensity of pSTAT3 expression was calculated on FlowJo.

TABLE 7
Antibody cocktail

| Fluorochrome | Antibody | Phosphorylation Site | Clone | Vendor | Catalog# |
|---|---|---|---|---|---|
| BV480 | CD4 | | L200 | BD | 566148 |
| | | | | Biosciences | |
| BV605 | CD8a | | RPA-T8 | BioLegend | 301040 |
| BV786 | CD56 | | 5.1H11 | BioLegend | 362550 |
| AF488 | pSTAT3 | Tyr705 | D3A7 | CST | 4323S |
| PE-Cy5 | CD3 | | UCHT1 | BD | 555334 |
| | | | | Biosciences | |
| PerCP-Cy 5.5 | CD14 | | M5E2 | BioLegend | 301824 |
| APC | CD20 | | 1412 | BioLegend | 340516 |

### Example 2. Screening

[0467] 84 anti-IL10Rα/IL2Rγ V_{H}H²s were screened for pSTAT3 activity in the various cell populations that constitute PBMCs (FIGS. 2A-2E). Anti-IL10Rα/IL2Rγ V_{H}H²s that showed at least a 50% increase in pSTAT3 induction over unstimulated control in CD4 T cells were considered as “hits”. The screen yielded 12 hits (See Table 8 below). These 12 anti-IL10Rα/IL2Rγ V_{H}H²s demonstrated nominal pSTAT3 activation in B cells and NK cells, while retaining a robust pSTAT3 activation in CD4⁺ and CD8⁺ T cells and showed minimal pSTAT3 induction in monocytes as compared to the unstimulated control.

TABLE 8
pSTAT3 MFI

| Well | | B | NK | CD4⁺ T | CD8⁺ T | Mono- |
|---|---|---|---|---|---|---|
| ID | Test Article | cells | cells | cells | cells | cytes |
| n/a | Unstimulated | 1045 | 1149 | 1778 | 1288 | 1787 |
| n/a | WT IL10 | 2395 | 4385 | 9665 | 8811 | 27111 |
| F1 | DR441(DR236- | 1284 | 1662 | 5755 | 3945 | 2129 |
| | DR231) | | | | | |
| H1 | DR465(DR240- | 1655 | 1884 | 6349 | 4512 | 2352 |
| | DR231) | | | | | |
| A2 | DR395(DR229- | 1026 | 1427 | 3567 | 2703 | 2020 |
| | DR239) | | | | | |
| F3 | DR449(DR237- | 1094 | 1248 | 2705 | 1876 | 1883 |
| | DR233) | | | | | |
| G3 | DR471(DR241- | 1142 | 1698 | 6235 | 4224 | 1941 |
| | DR231) | | | | | |
| A7 | DR392(DR229- | 1060 | 1282 | 3341 | 2388 | 1886 |
| | DR236) | | | | | |
| F7 | DR442(DR236- | 1047 | 1225 | 3108 | 2101 | 1792 |
| | DR232) | | | | | |
| H7 | DR466(DR240- | 1104 | 1281 | 3166 | 2313 | 1870 |
| | DR232) | | | | | |
| E8 | DR444(DR236- | 1069 | 1273 | 3704 | 2409 | 1830 |
| | DR234) | | | | | |
| G8 | DR468(DR240- | 1080 | 1287 | 3517 | 2261 | 1862 |
| | DR234) | | | | | |
| H9 | DR474(DR241- | 1033 | 1234 | 3769 | 2465 | 2325 |
| | DR234) | | | | | |
| D12 | DR438(DR235- | 1047 | 1174 | 2775 | 1833 | 1806 |
| | DR234) | | | | | |

### Example 3: Dose Response Experiment

[0468] Four anti-IL10Rα/IL2Rγ V_{H}H² proteins demonstrating the highest levels of activity as identified from the initial screen based on pSTAT3 induction (Example 2) were further tested in a dose response experiment on B cells, CD4⁺ T cells, NK cells, CD8⁺ T cells, and monocytes. As detailed in Example 1, PBMCs were either left unstimulated or were stimulated with wild-type human IL10 (wt hIL10) or one of the four anti-IL10Rα/IL2Rγ V_{H}H² proteins: (DR395(DR229-DR239), DR441(DR236-DR231), DR471(DR241-DR231), and DR465(DR240-DR231)) over a range of concentrations from 0.0001 nM to 100 nM in ten-fold dilution on B cells, CD4⁺ T cells, NK cells, CD8⁺ T cells, and monocytes. The tables tabulating the pSTAT3 MFI in a dose response experiment in various cell lineages are shown below.

TABLE 9A
B cells pSTAT3 MFI

| IL10 (nM) | Unstimulated | WT- IL10 | A2- DR395(229-239) | F1- DR441(236-231) | G3- DR471(241-231) | H1- DR465(240-231) |
|---|---|---|---|---|---|---|
| 0 | 1193.5 | | | | | |
| 0.0001 | | 1164 | 1126 | 1118 | 1110 | 1108.5 |
| 0.001 | | 1137 | 1131 | 1130.5 | 1125 | 1100 |
| 0.01 | | 1216 | 1137 | 1129 | 1111 | 1087.5 |
| 0.1 | | 1778 | 1153 | 1122 | 1109.5 | 1113.5 |
| 1 | | 3954.5 | 1264.5 | 1220.5 | 1172 | 1289.5 |
| 10 | | 3928 | 1335 | 1539 | 1335 | 1844.5 |
| 100 | | 2624.5 | 1359.5 | 1473.5 | 1277 | 1854.5 |

TABLE 9B
CD4 T cells pSTAT3 MFI

| IL10 (nM) | Unstimulated | WT- IL10 | A2- DR395(229-239) | F1- DR441(236-231) | G3- DR471(241-231) | H1- DR465(240-231) |
|---|---|---|---|---|---|---|
| 0 | 1887 | | | | | |
| 0.0001 | | 1967 | 1803 | 1806 | 1798.5 | 1803 |
| 0.001 | | 1881.5 | 1872 | 1829.5 | 1860 | 1800 |
| 0.01 | | 2223.5 | 1890 | 1879 | 1861.5 | 1846 |
| 0.1 | | 5171 | 2449 | 2235.5 | 2248.5 | 2213.5 |
| 1 | | 10717 | 4573 | 4556.5 | 4599.5 | 4729 |
| 10 | | 10785.5 | 5176 | 6755 | 6804 | 7236.5 |
| 100 | | 9556 | 4668.5 | 6354.5 | 6200 | 7067.5 |

TABLE 9C
NK cells pSTAT3 MFI

| IL10 (nM) | Unstimulated | WT- IL10 | A2- DR395(229-239) | F1- DR441(236-231) | G3- DR471(241-231) | H1- DR465(240-231) |
|---|---|---|---|---|---|---|
| 0 | 1315 | | | | | |
| 0.0001 | | 1314.5 | 1256 | 1248 | 1234 | 1224 |
| 0.001 | | 1274 | 1269.5 | 1261 | 1258 | 1226 |
| 0.01 | | 1376 | 1259.5 | 1268.5 | 1250.5 | 1216 |
| 0.1 | | 2281 | 1307 | 1269.5 | 1260.5 | 1245.5 |
| 1 | | 4617.5 | 1637.5 | 1437.5 | 1533.5 | 1519.5 |
| 10 | | 5700 | 1804.5 | 1797.5 | 1998 | 2039.5 |
| 100 | | 4793.5 | 1757.5 | 1774 | 1935 | 2126 |

TABLE 9D
CD8 T cells pSTAT3 MFI

| IL10 (nM) | Unstimulated | WT- IL10 | A2- DR395(229-239) | F1- DR441(236-231) | G3- DR471(241-231) | H1- DR465(240-231) |
|---|---|---|---|---|---|---|
| 0 | 1446 | | | | | |
| 0.0001 | | 1699.5 | 1376.5 | 1381 | 1395.5 | 1385.5 |
| 0.001 | | 1434.5 | 1421.5 | 1409 | 1423 | 1374.5 |
| 0.01 | | 1722.5 | 1405 | 1432 | 1420.5 | 1376.5 |
| 0.1 | | 4300.5 | 1795.5 | 1605.5 | 1638.5 | 1587.5 |
| 1 | | 8891 | 3319 | 3061.5 | 3281.5 | 3261 |
| 10 | | 9891 | 3878 | 4472.5 | 4614 | 4847 |
| 100 | | 9006 | 3447 | 4257 | 4399 | 5018 |

TABLE 9E
Monocytes pSTAT3 MFI

| IL10 (nM) | Unstimulated | WT- IL10 | A2- DR395(229-239) | F1- DR441(236-231) | G3- DR471(241-231) | H1- DR465(240-231) |
|---|---|---|---|---|---|---|
| 0 | 2116 | | | | | |
| 0.0001 | | 2051 | 2055.5 | 2026.5 | 2008 | 1988 |
| 0.001 | | 2140.5 | 2062.5 | 2041 | 2030.5 | 1974 |
| 0.01 | | 2842 | 2016.5 | 2033 | 1995 | 1946.5 |
| 0.1 | | 9547 | 2019 | 2013.5 | 1988 | 1964 |
| 1 | | 28900.5 | 2209.5 | 2063 | 2032.5 | 2110.5 |
| 10 | | 30917 | 2338 | 2344 | 2228.5 | 2470.5 |
| 100 | | 26589.5 | 2436 | 2293.5 | 2212 | 2469.5 |

[0469] As can be seen from the foregoing data and FIGS. 3A-3E, the anti-IL10Rα/IL2Rγ V_{H}H² proteins of the present disclosure demonstrated a dose dependent induction of pSTAT3 with most induction seen in CD4⁺ T cells and CD8⁺ T cells, followed by NK cells and B cells. Monocytes showed very minimal induction of pSTAT3, especially compared to the levels of pSTAT3 induction seen with WT IL10. The foregoing demonstrates the ability of the IL10Rα/IL2Rγ binding proteins of the present disclosure to provide selective cell type activation, retaining the desirable property of stimulating T cells while having a minimal impact on monocytes.

### Example 4—V_{H}H Generation

[0470] Camels were acclimated at research facility for at least 7 days before immunization. Antigen was diluted with 1×PBS (antigen total about 1 mg). The quality of the antigen was assessed by SDS-PAGE to ensure purity (e.g., >80%). For the first time, 10 mL CFA (then followed 6 times using IFA) was added into mortar, then 10 mL antigen in 1×PBS was slowly added into the mortar with the pestle grinding. The antigen and CFA/IFA were ground until the component showed milky white color and appeared hard to disperse. Camels were injected with antigen emulsified in CFA subcutaneously at at least six sites on the body, injecting about 2 mL at each site (total of 10 mL per camel). A stronger immune response was generated by injecting more sites and in larger volumes. The immunization was conducted every week (7 days), for 7 times. The needle was inserted into the subcutaneous space for 10 to 15 seconds after each injection to avoid leakage of the emulsion. Alternatively, a light pull on the syringe plunger also prevented leakage. The blood sample was collected three days later after 7^{th} immunization.

[0471] After immunization, the library was constructed. Briefly, RNA was extracted from blood and transcribed to cDNA. The V_{H}H regions were obtained via two-step PCR, which fragment about 400 bp. The PCR outcomes and the vector of pMECS phagemid were digested with Pst I and Not I, subsequently, ligated to pMECS/Nb recombinant. After ligation, the products were transformed into Escherichia coli (E. coli) TG1 cells by electroporation. Then, the transformants were enriched in growth medium and planted on plates. Finally, the library size was estimated by counting the number of colonies.

[0472] Library biopanning was conducted to screen candidates against the antigens after library construction. Phage display technology was applied in this procedure. Positive colonies were identified by PE-ELISA.

### Example 5—Recombinant Production and Purification

[0473] Codon optimized DNA inserts were cloned into modified pcDNA3.4 (Genscript) for small scale expression in HEK293 cells in 24 well plates. The binding molecules were purified in substantial accordance with the following procedure. Using a Hamilton Star automated system, 96×4 mL of supernatants in 4×24-well blocks were re-arrayed into 4×96-well, 1 mL blocks. PhyNexus micropipette tips (Biotage, San Jose CA) holding 80 μL of Ni-Excel IMAC resin (Cytiva) are equilibrated wash buffer: PBS pH 7.4, 30 mM imidazole. PhyNexus tips were dipped and cycled through 14 cycles of 1 mL pipetting across all 4×96-well blocks. PhyNexus tips were washed in 2×1 mL blocks holding wash buffer. PhyNexus tips were eluted in 3×0.36 mL blocks holding elution buffer: PBS pH 7.4, 400 mM imidazole. PhyNexus tips were regenerated in 3×1 mL blocks of 0.5 M sodium hydroxide.

[0474] The purified protein eluates were quantified using a Biacore® T200 as in substantial accordance with the following procedure. 10 μL of the first 96×0.36 mL eluates were transferred to a Biacore® 96-well microplate and diluted to 60 uL in HBS-EP+ buffer (10 mM Hepes pH 7.4, 150 mM NaCl, 1 mM EDTA, 0.05% Tween 20). Each of the 96 samples was injected on a CM5 series S chip previously functionalized with anti-histidine capture antibody (Cytiva): injection is performed for 18 seconds at 5 μL/min. Capture levels were recorded 60 seconds after buffer wash. A standard curve of known V_{H}H concentrations (270, 90, 30, 10, 3.3, 1.1 pg/mL) was acquired in each of the 4 Biacore chip flow cells to eliminate cell-to-cell surface variability. The 96 captures were interpolated against the standard curve using a non-linear model including specific and unspecific, one-site binding. Concentrations in the first elution block varied from 12 to 452 μg/mL corresponding to a 4-149 μg. SDS-PAGE analysis of 5 randomly picked samples was performed to ensure molecular weight of eluates corresponded to expected values (˜30 kDa).

[0475] The concentration of the proteins was normalized using the Hamilton Star automated system in substantial accordance with the following procedure. Concentration values are imported in an Excel spreadsheet where pipetting volumes were calculated to perform dilution to 50 μg/mL in 0.22 mL. The spreadsheet was imported in a Hamilton Star method dedicated to performing dilution pipetting using the first elution block and elution buffer as diluent. The final, normalized plate was sterile filtered using 0.22 μm filter plates (Corning).

### Example 6. Evaluation of Binding Affinity of IL10Ra/IL2Rg Dimers Via SPR

[0476] All experiments were conducted in 10 mM Hepes, 150 mM NaCl, 0.05% (v/v) Polysorbate 20 (PS20) and 3 mM EDTA (HBS-EP+ buffer) on a Biacore T200 instrument equipped with Protein A or CAP biotin chips (Cytiva). For experiments on Protein A chips, Fc-fused ligands were flowed at 5 μl/min for variable time ranging from 18 to 300 seconds, reaching the capture loads listed in the tables below. Following ligand capture, injections of a 2-fold dilution series of analyte typically comprising at least five concentrations between 1 μM and 1 nM were performed in either high performance or single cycle kinetics mode. Surface regeneration was achieved by flowing 10 mM glycine-HCl, pH 1.5 (60 seconds, 50 L/min). Buffer-subtracted sensograms were processed with Biacore T200 Evaluation Software and globally fit with a 1:1 Langmuir binding model (bulk shift set to zero) to extract kinetics and affinity constants (kₐ, k_{d}, K_{D}). R_{MAX}<100 RU indicates surface density compatible with kinetics analysis. Experiments on CAP chips were performed as described above with an additional capture step of Biotin CAPture reagent (10 seconds, 40 uL/min) performed prior to capture of biotinylated ligands. Calculated Rmax were generated using the equation Rmax=Load (RU) x valency of ligand x (Molecular weight of analyte/Molecular weight of ligand. Surface activity was defined as the ratio experimental/calculated Rmax. The results of these experiments are provided in below for sample information and experimental results.

### Example 7: Dose Response Experiment with Fc Versions

[0477] Two of the VHHs and their Fc versions were tested in a dose response curve as described above. As detailed in example 1, PBMCs were either left unstimulated or were stimulated with WT IL10 or one of the 2 IL10R1/2y VHHs [DR395(DR229-DR239), DR465(DR240-DR231) or the Fc versions of the VHHs [DR992 (H1, DR240-DR231), DR995 (A2, DR229-DR239)] at concentrations ranging from 0.1 pM-100 nM for 20 min at 37° C. The staining and analysis was done as described in Example 1. The results are provided in FIGS. 9A-E of the accompanying drawings. The Fc molecules, H1-Fc [DR992, DR240-DR231)] and A2-Fc [DR995 (DR229-DR239)] were more potent as compared to their non-Fc counterparts, H1 [DR465(DR240-DR231)] and A2[DR395(DR229-DR239)] at inducing pSTAT3 signal in CD4 T cells, CD8 T cells, B cells and NK cells. The pSTAT3 signal in monocytes was still very minimal compared to the levels of pSTAT3 induction seen with WT IL10.

### Example 8: Monocyte Functional Assay

[0478] Human monocytes were purified from human PBMCs using CD14 microbeads (Miltenyi Biotech 130-050-201). The purified monocytes were seeded at 100,000 cells per well in a 96-well flat bottom plate and treated with IL10 at concentrations ranging from 0.1 pM-100 nM in complete RPMI medium [RPMI containing 10% FBS and 1× Penicillin/Streptomycin (Gibco, Cat. #15-140-122)] for 48 hours min at 37° C. After the 48-hour treatment, plates were spun down at 400 g for 5 min and supernatants were collected. The supernatants were tested on a Meso Scale discovery assay (Meso Scale Discovery Catalog no. K151A9H) to measure the levels of cytokines IL1b, IL6, IL8 and TNFa. The results of these studies are provided in FIGS. 10A-10D of the accompanying drawings. The IL10R1/2y VHHs, H1 [DR465(DR240-DR231)] and A2[DR395(DR229-DR239)] did not inhibit LPS induced secretion of IL1b, IL6, TNFa and IL8, correlating with the lack of induction of pSTAT3 signaling in the Monocytes. The Fc version of the molecules were slightly more potent at inhibiting secretion of LPS induced IL1b and TNFa production as compared to their non-Fc counterparts, but did not cause complete inhibition even at higher concentrations of stimulus.

### Example 9: CD8 Blast Functional Assay

[0479] Human CD8 T cells were purified from human PBMCs by negative selection using the CD8⁺ T cell isolation kit (Milteyi Biotec 130-096-495). Isolated CD8 T cells were then activated using the human CD8 T cell activation/expansion kit (Miltenyi Biotec 130-091-441) for 3 days. The day 3 CD8 T cell blasts were then treated with IL10 at concentrations ranging from 0.1 pM-100 nM in Yssel's medium [(IMDM, Gibco, Cat. #122440-053) containing 0.25% w/v Human Albumin (Sigma, Cat. #A9080), 1×ITS-X (human) (Gibco, Cat. #51500056), 30 mg/L Transferrin (Roche, Cat. #10652202001), 2 mg/L PA BioXtra (Sigma, Cat. #P5585), 1×LA-OA-Albumin (Sigma, Cat. #L9655), 1× Penicillin/Streptomycin (Gibco, Cat. #15-140-122), 1% Human Serum (Gemini, Cat. #507533011)], for 72 hours at 37° C. In the last 5 hours of incubation, cells were treated with 1:1000 Monensin (eBiosciences, Cat. #00-4505-51). After incubation, cells were washed with PBS and stained with Zombie NIR fixable viability dye (Biolegend, Cat. #423105) for 15 minutes at 4′C in the dark. Cells were washed twice in pre-made FACS Buffer (PBS+2% FBS) and then fixed in IC fixation buffer (Invitrogen 00-8222) for 20 min at room temperature. Cells were then spun down and permeabilized with 1× permeabilization buffer (Invitrogen 00-833) for 5 min.

[0480] Cells were resuspended in permeabilization buffer, briefly blocked with 1:10 Human TruStain FcX Fc Block (Biolegend, Cat. #422302) and then stained with anti-Granzyme A antibody (Biolegend Cat. #507206), and anti-Granzyme B antibody (BD 562462) for 1 hour at room temperature, in the dark. Cells were then washed with FACS Buffer twice and resuspended in FACS Buffer containing 1% PFA (Electron Microscopy Sciences, Cat. #15710) for at least 10 minutes at room temperature in the dark prior to acquisition on the Cytek Aurora Spectral flow cytometer. The data was analyzed using the FlowJo software. The results of these studies are provided in FIGS. 11A and 11B of the accompanying drawings. [0322] The IL10R1/2y VHHs, H1 [DR465(DR240-DR231)] and A2[DR395(DR229-DR239)] induce Granzyme A production at higher concentration of stimulus and are weak inducers of Granzyme B production. The addition of Fc to the molecule enhanced its activity with H1-Fc and A2-Fc being as potent as the WT in inducing Granzyme A production while also being more potent at inducing Granzyme B production.

TABLE 10
anti-human IL10Ra sdAb CDRs

| | CDR 1 | | | | | |
|---|---|---|---|---|---|---|
| | Kabat/ | SEQ | | SEQ | | SEQ |
| | chothia | ID | | ID | | ID |
| Name | hybrid) | NO: | CDR 2 | NO: | CDR 3 | NO: |
| hIL10Ra_ | YLYSIDYMA | 276 | VIYTASGATFYPDSVKG | 277 | VRKTDSYLFDAQS | 278 |
| VHH1 | | | | | FTY | |
| hIL10Ra_ | YLYSTNYMA | 279 | VIYTASGATLYTDSVKG | 280 | VRKTDSYLFDAQS | 281 |
| VHH2 | | | | | FTY | |
| hIL10Ra_ | YLYSTNYMA | 282 | VIYTASGATLYTDSVKG | 283 | VRKTDSYLFDAQS | 284 |
| VHH3 | | | | | FTY | |
| hIL10Ra_ | YLYSIDYMA | 285 | VIYTASGATFYPDSVKG | 286 | VRKTDSYLFDAQS | 287 |
| VHH4 | | | | | FTY | |
| hIL10Ra_ | YLYSTNYMA | 288 | AIYTASGATLYSDSNKG | 289 | VRKTGSYLFDAQS | 290 |
| VHH5 | | | | | FTY | |
| hIL10Ra_ | FTYSSYCMG | 291 | SIDSDGSTSYTDSVKG | 292 | DLMSTVVPGFCGF | 293 |
| VHH6 | | | | | LLSAGMDY | |
| hIL10Ra_ | YTFNSNCMG | 294 | TIYTGVGSTYYADSVKG | 295 | EPLSRVYGGSCPT | 296 |
| VHH7 | | | | | PTFGY | |
| hIL10Ra_ | YTYSMYCMG | 297 | QINSDGSTSYADSVKG | 298 | DSRVYGGSWYERL | 299 |
| VHH8 | | | | | CGPYTYEYNY | |
| hIL10Ra_ | YAYSTYCMG | 300 | AIDSGGSTSYADSVKG | 301 | VPPPPDGGSCLFL | 302 |
| VHH9 | | | | | GPEIKVSKADFRY | |
| hIL10Ra_ | YLYSIDYMA | 303 | VIYTASGATFYPDSVKG | 304 | VRKTDSYLFDAQS | 305 |
| VHH10 | | | | | FTY | |
| hIL10Ra_ | YTYSSYCMG | 306 | VIDSDGSTSYADSVKG | 307 | DLGHYRPPCGVLY | 308 |
| VHH11 | | | | | LGMDY | |
| hIL10Ra_ | YTYSSNCMG | 309 | TIYTGGGNTYYADSVKG | 310 | EPLSRVYGGSCPT | 311 |
| VHH12 | | | | | PTFDY | |
| hIL10Ra_ | YSYSSNCMG | 312 | TIHTGGGSTYYADSVKG | 313 | EPLSRLYGGSCPT | 314 |
| VHH13 | | | | | PTFGY | |
| hIL10Ra_ | YTYSSYCMG | 315 | VIDSDGSTSYADSVKG | 316 | DLGHYRPPCGVLY | 317 |
| VHH14 | | | | | LGMDY | |
| hIL10Ra_ | YTYSGYCMG | 318 | VIDSDGSTSYADSVKG | 319 | DLGHYRPPCGVLY | 320 |
| VHH15 | | | | | LGMDY | |
| hIL10Ra_ | YTYSNYCMG | 321 | TIDSDGNTSYADSVKG | 322 | DLGHYRPPCGAYY | 323 |
| VHH16 | | | | | YGMDY | |
| hIL10Ra_ | YSNCSYDMT | 324 | AIHSDGSTRYADSVKG | 325 | DPLHCRAHGGSWY | 326 |
| VHH17 | | | | | SVRANY | |
| hIL10Ra_ | YTYNSNCMG | 327 | TIYTGVGSTYYADSVKG | 328 | EPLSRVYGGSCPT | 329 |
| VHH18 | | | | | PTFGY | |

TABLE 11
human anti-IL2Rg sdAb CDRs

| | CDR 1 | SEQ | | SEQ | | SEQ |
|---|---|---|---|---|---|---|
| | (Kabat/ | ID | | ID | | ID |
| Name | chothia) | NO: | CDR 2 | NO: | CDR 3 | NO: |
| hIL2Rg_VHH-1 | FTFDDSDMG | 330 | TISSDGSTYYADSVKG | 331 | DFMIAIQAPGAGC | 332 |
| hIL2Rg_VHH-2 | FSFSSYPMT | 333 | TIASDGGSTAYAASVE | 334 | GYGDGTPA | 335 |
| | | | G | | | |
| hIL2Rg_VHH-3 | FTFDDREMN | 336 | TISSDGSTYYADSVKG | 337 | DFMIAIQAPGAGC | 338 |
| hIL2Rg_VHH-4 | FTFDDSDMG | 339 | TISSDGNTYYTDSVKG | 340 | EPRGYYSNYGGRR | 341 |
| | | | | | ECNY | |
| hIL2Rg_VHH-5 | FSFSSYPMT | 342 | TIASDGGSTAYAASVE | 343 | GYGDGTPA | 344 |
| | | | G | | | |
| hIL2Rg_VHH-6 | FTFSNAHMS | 345 | SIYSGGSTWYADSVKG | 346 | NRLHYYSDDDSL | 347 |
| hIL2Rg_VHH-7 | FTFDDREMN | 348 | TISSDGSTYYADSVKG | 349 | DFMIAIQAPGAGC | 350 |
| hIL2Rg_VHH-8 | YTFSSYCMG | 351 | ALGGGSTYYADSVKG | 352 | AWVACLEFGGSWY | 353 |
| | | | | | DLARYKH | |
| hIL2Rg_VHH-9 | FTFDDSDMG | 354 | TISSDGSTYYADSVKG | 355 | EPRGYYSNYGGRR | 356 |
| | | | | | ECNY | |
| hIL2Rg_VHH-10 | SIYSSAYIG | 357 | GIYTRDGSTAYADSVK | 358 | GRRTKSYVYIFRP | 359 |
| | | | G | | EEYNY | |
| hIL2Rg_VHH-11 | FTFSSAHMS | 360 | SIYSGGGTFYADSVKG | 361 | NRLHYYSDDDSL | 362 |
| hIL2Rg_VHH-12 | FTFSNAHMS | 363 | SIYSGGSTWYADSVKG | 364 | NRLHYYSDDDSL | 365 |
| hIL2Rg_VHH-13 | FIFDDSDMG | 366 | TISSDGSTYYADSVKG | 367 | EPRGYYSNYGGRR | 368 |
| | | | | | ECNY | |
| hIL2Rg_VHH-14 | FTADDSDMG | 369 | TISSDGSTYYADSVKG | 370 | EPRGYYSNYGGRR | 371 |
| | | | | | ECNY | |
| hIL2Rg_VHH-15 | FTFSSAHMS | 372 | SIYSGGGTFYADSVKG | 373 | NRLHYYSDDDSL | 374 |
| hIL2Rg_VHH-16 | FTFSNAHMS | 375 | SIYSGGSTWYADSVKG | 376 | NRLHYYSDDDSL | 377 |
| hIL2Rg_VHH-17 | FTFSNAHMS | 378 | SIYSGGSTWYADSVKG | 379 | NRLHYYSDDDSL | 380 |
| hIL2Rg_VHH-18 | FTFSSYPMT | 381 | TIASDGGSTAYAASVE | 382 | GYGDGTPA | 383 |
| | | | G | | | |
| hIL2Rg_VHH-19 | FTFDDREMN | 384 | TISSDGSTYYADSVKG | 385 | DFMIAIQAPGAGC | 386 |
| hIL2Rg_VHH-20 | FTFDDSDMG | 387 | TISSDGSTYYADSVKG | 388 | EPRGYYSNYGGRR | 389 |
| | | | | | ECNY | |
| hIL2Rg_VHH-21 | YTSCMG | 390 | TIYTRGRSIYYADSVK | 391 | GGYSWSAGCEFNY | 392 |
| | | | G | | | |
| hIL2Rg_VHH-22 | FSFSSYPMT | 393 | TIASDGGSTAYAASVE | 394 | GYGDGTPA | 395 |
| | | | G | | | |
| hIL2Rg_VHH-23 | FSFSSYPMT | 396 | TIASDGGSTAYAASVE | 397 | GYGDGTPA | 398 |
| | | | G | | | |

TABLE 12
mouse anti-IL2Rg sdAb CDRs

| | CDR 1 | SEQ | | SEQ | | SEQ |
|---|---|---|---|---|---|---|
| | (Kabat/ | ID | | ID | | ID |
| Name | chothia) | NO: | CDR 2 | NO: | CDR 3 | NO: |
| mIL2Rg_ | YGYNYIG | 399 | VIYTGGGDT | 400 | SVYACLRGGHDEY | 401 |
| VHH1 | | | YYADSVKG | | AH | |
| mIL2Rg_ | STYANYLMG | 402 | AIYSGGGST | 403 | ASAVKGDKGDIVV | 404 |
| VHH2 | | | YYADSVKG | | VVTGTQRMEYDY | |
| mIL2Rg_ | FTFDESVMS | 405 | IISSDDNTY | 406 | RRRRPVYDSDYEL | 407 |
| VHH3 | | | YDDSVKG | | RPRPLCGDFGV | |
| mIL2Rg_ | LPFDEDDMG | 408 | SISSDGTAY | 409 | GVHRQFGGSSSCG | 410 |
| VHH4 | | | YADSVKG | | DAFYGMDY | |
| mIL2Rg_ | DVYGRNSMA | 411 | VGYSVVTTT | 412 | DGNLWRGLRPSEY | 413 |
| VHH5 | | | YYADSVKG | | TY | |
| mIL2Rg_ | FPYSRYCMG | 414 | AIEPDGSTS | 415 | DERCFYLKDYDLR | 416 |
| VHH6 | | | YADSVKG | | RPAQYRY | |
| mIL2Rg_ | FTFDESDMG | 417 | VITSDDNPY | 418 | RSRQPVYSRDYEL | 419 |
| VHH7 | | | YDDSVKG | | RPRPLCGDFGV | |
| mIL2Rg_ | FTFDDFDMG | 420 | TISDDGSTY | 421 | EGALGSKTNCGWV | 422 |
| VHH8 | | | YADSVKG | | GNFGY | |
| mIL2Rg_ | FTFDDFDMG | 423 | TISDDGSTY | 424 | EGALGSKTNCGWV | 425 |
| VHH9 | | | YADSVKG | | GNFGY | |
| mIL2Rg_ | FTFDDFDMG | 426 | TISDDGSTY | 427 | EGALGSKTNCGWV | 428 |
| VHH10 | | | YADSVKG | | GNFGY | |
| mIL2Rg_ | FTFSDRDMG | 429 | TISDDGSTY | 430 | EGALGSKTNCGWV | 431 |
| VHH11 | | | YADSVKG | | GNFGY | |
| mIL2Rg_ | YGYNYIG | 432 | VIYIGGGDT | 433 | RYCVGSVYACLRG | 434 |
| VHH12 | | | YYADSVKG | | GHDEYAH | |
| mIL2Rg_ | YGYNYIG | 435 | VIYTGGGDT | 436 | RYCVGSVYACLRG | 437 |
| VHH13 | | | YYADSVKG | | GHDEYAH | |
| mIL2Rg_ | FTFDDFDMG | 438 | TISDDGSTY | 439 | EGALGSKTNCGWV | 440 |
| VHH14 | | | YANSVKG | | GNFGY | |
| mIL2Rg_ | FTFDDFDMG | 441 | TISDDGSTY | 442 | EGALGSKMNCGWV | 443 |
| VHH15 | | | YADSVKG | | GNFGY | |

TABLE 13
human anti-IL10Ra VHH Amino Acid Sequences

| | | SEQ |
|---|---|---|
| | | ID |
| Name | VHH Sequence | NO: |
| hIL10Ra_VHH1 | QVQLQESGGGSIQAGGSLRLSCAAS | 444 |
| | RYLYSIDYMAWFRQSPGKEREPVAV | |
| | IYTASGATFYPDSVKGRFTISQDNA | |
| | KMTVYLQMNSLKSEDTAMYYCAAVR | |
| | KTDSYLFDAQSFTYWGQGTQVTVSS | |
| hIL10Ra_VHH2 | QVQLQESGGGSVQAGGSLRLSCVAS | 445 |
| | RYLYSTNYMAWFRQSPGKEREAVAV | |
| | IYTASGATLYTDSVKGRFTISQDNA | |
| | KMTVYLQMNRLKSEDTAMYYCAAVR | |
| | KTDSYLFDAQSFTYWGQGTQVTVSS | |
| hIL10Ra_VHH3 | QVQLQESGGGSIQAGGSLRLSCVAS | 446 |
| | RYLYSTNYMAWFRQSPGKEREAVAV | |
| | IYTASGATLYTDSVKGRFTISQDNA | |
| | KMTVYLQMNRLKSEDTAMYYCAAVR | |
| | KTDSYLFDAQSFTYWGQGTQVTVSS | |
| hIL10Ra_VHH4 | QVQLQESGGGSIQAGGSLRLSCAAS | 447 |
| | RYLYSIDYMAWFRQSPGKEREPAAV | |
| | IYTASGATFYPDSVKGRFTISQDNA | |
| | KMTVYLQMNSLKSEDTAMYYCAAVR | |
| | KTDSYLFDAQSFTYWGQGTQVTVSS | |
| hIL10Ra_VHH5 | QVQLQESGGGSIQAGGSLRLSCVAS | 448 |
| | KYLYSTNYMAWFRQSPGKEREAVAA | |
| | IYTASGATLYSDSNKGRFTISQDNA | |
| | KMTVYLQMNSLKSEDTAMYYCAAVR | |
| | KTGSYLFDAQSFTYWGQGTQVTVSS | |
| hIL10Ra_VHH6 | QVQLQESGGGSVQAGGSLRLSCAAS | 449 |
| | RFTYSSYCMGWFRQAPGKEREGVAS | |
| | IDSDGSTSYTDSVKGRFTISKDNAK | |
| | NTLYLQMNSLKPEDTAMYYCALDLM | |
| | STVVPGFCGFLLSAGMDYWGKGTQV | |
| | TVSS | |
| hIL10Ra_VHH7 | QVQLQESGGGSVQAGGSLRLSCAVS | 450 |
| | GYTFNSNCMGWFRQAPGKEREGVAT | |
| | IYTGVGSTYYADSVKGRFTISQDNA | |
| | KNTVYLQMNSLKPEDTAMYYCAAEP | |
| | LSRVYGGSCPTPTFGYWGQGTQVTV | |
| | SS | |
| hIL10Ra_VHH8 | QVQLQESGGGSVQAGGSLRLSCAAS | 451 |
| | GYTYSMYCMGWFRQAPGKEREGVAQ | |
| | INSDGSTSYADSVKGRFTISKDNAK | |
| | NTLYLQMNSLKPEDTAMYYCAADSR | |
| | VYGGSWYERLCGPYTYEYNYWGQGT | |
| | QVTVSS | |
| hIL10Ra_VHH9 | QVQLQESGGGSVQAGGSLRLSCAVS | 452 |
| | GYAYSTYCMGWFRQAPGKEREGVAA | |
| | IDSGGSTSYADSVKGRFTISKDNAK | |
| | NTLYLRMNSLKPEDTAMYYCAAVPP | |
| | PPDGGSCLFLGPEIKVSKADFRYWG | |
| | QGTQVTVSS | |
| hIL10Ra_VHH10 | QVQLQESGGGSVQAGGSLRLSCAAS | 453 |
| | RYLYSIDYMAWFRQSPGKEREPVAV | |
| | IYTASGATFYPDSVKGRFTISQDNA | |
| | KMTVYLQMNSLKSEDTAMYYCAAVR | |
| | KTDSYLFDAQSFTYWGQGTQVTVSS | |
| hIL10Ra_VHH11 | QVQLQESGGGSVQAGGSLRLSCGAS | 454 |
| | RYTYSSYCMGWFRQAPGKEREGVAV | |
| | IDSDGSTSYADSVKGRFTISKDNGK | |
| | NTLYLQMNSLKPEDTAMYYCAADLG | |
| | HYRPPCGVLYLGMDYWGKGTQVTVS | |
| | S | |
| hIL10Ra_VHH12 | QVQLQESGGGSVQAGGSLRLSCTVS | 455 |
| | GYTYSSNCMGWFRQAPGKEREGVAT | |
| | IYTGGGNTYYADSVKGRFTISQDNA | |
| | KNTVYLQMNNLKPEDTAMYYCAAEP | |
| | LSRVYGGSCPTPTFDYWGQGTQVTV | |
| | SS | |
| hIL10Ra_VHH13 | QVQLQESGGGSVQAGGSLRLSCAVS | 456 |
| | GYSYSSNCMGWFRQAPGKEREGVAT | |
| | IHTGGGSTYYADSVKGRFTISQDNA | |
| | KNTVYLQMNSLKPEDTAMYYCAAEP | |
| | LSRLYGGSCPTPTFGYWGQGTQVTV | |
| | SS | |
| hIL10Ra_VHH14 | QVQLQESGGGSVQAGGSLRLSCGAS | 457 |
| | GYTYSSYCMGWFRQVPGKEREGVAV | |
| | IDSDGSTSYADSVKGRFTISKDNGK | |
| | NTLYLQMNSLKPEDTAMYYCAADLG | |
| | HYRPPCGVLYLGMDYWGKGTQVTVS | |
| | S | |
| hIL10Ra_VHH15 | QVQLQESGGGSVQAGGSLRLSCGAS | 458 |
| | GYTYSGYCMGWFRQAPGKEREGVAV | |
| | IDSDGSTSYADSVKGRFTISKDNGK | |
| | NTLYLQMNSLKPEDTAMYYCAADLG | |
| | HYRPPCGVLYLGMDYWGKGTQVTVS | |
| | S | |
| hIL10Ra_VHH16 | QVQLQESGGGSVQAGGSLRLACAAS | 459 |
| | RYTYSNYCMGWFRQAPGKEREGVAT | |
| | IDSDGNTSYADSVKGRFTISRDNAK | |
| | NTLYLQMNSLKPGDTAMYYCAADLG | |
| | HYRPPCGAYYYGMDYWGKGTQVTVS | |
| | S | |
| hIL10Ra_VHH17 | QVQLQESGGGSVQAGGSLRLSCAAS | 460 |
| | GYSNCSYDMTWYRQAPGKEREFVSA | |
| | IHSDGSTRYADSVKGRFFISQDNAK | |
| | NTVYLQMNSLKPEDTAMYYCKTDPL | |
| | HCRAHGGSWYSVRANYWGQGTQVTV | |
| | SS | |
| hIL10Ra_VHH18 | QVQLQESGGGSVQAGGSLRLSCAVS | 461 |
| | GYTYNSNCMGWFRQAPGKEREGVAT | |
| | IYTGVGSTYYADSVKGRFTISQDNA | |
| | KNTVYLQMNSLKPEDTAMYYCAAEP | |
| | LSRVYGGSCPTPTFGYWGQGTQVTV | |
| | SS | |

TABLE 14
human anti-IL2Rg VHH Amino Acid Sequences

| | | SEQ |
|---|---|---|
| | VHH Sequence | ID |
| Name | (CDRs are underlined) | NO: |
| hIL2Rg_ | QVQLQESGGGSVQAGGSLRLSCAASGFTFDDS | 276 |
| VHH-1 | DMGWYRQAPGNECDLVSTISSDGSTYYADSVK | |
| | GRFTISQDNAKNTVYLQMDSVKPEDTAVYYCA | |
| | ADFMIAIQAPGAGCWGQGTQVTVSS | |
| hIL2Rg_ | QVQLQESGGGSVPAGGSLKLSCAASGFSFSSY | 277 |
| VHH-2 | PMTWARQAPGKGLEWVSTIASDGGSTAYAASV | |
| | EGRFTISRDNAKSTLYLQLNSLKTEDTAMYYC | |
| | TKGYGDGTPAPGQGTQVTVSS | |
| hIL2Rg_ | QVQLQESGGGSVQTGGSLRLSCTASGFTFDDR | 278 |
| VHH-3 | EMNWYRQAPGNECELVSTISSDGSTYYADSVK | |
| | GRFTISQDNAKNTVYLQMDSVKPEDTAVYYCA | |
| | ADFMIAIQAPGAGCWGQGTQVTVSS | |
| hIL2Rg_ | QVQLQESGGGSVQAGGSLRLSCTASGFTFDDS | 279 |
| VHH-4 | DMGWYRQAPGNECELVSTISSDGNTYYTDSVK | |
| | GRFTISQDNAKNTVYLQMNSLGPEDTAVYYCA | |
| | AEPRGYYSNYGGRRECNYWGQGTQVTVSS | |
| hIL2Rg_ | QVQLQESGGGSVQAGGSLRLSCAASGFSFSSY | 280 |
| VHH-5 | PMTWARQAPGKGLEWVSTIASDGGSTAYAASV | |
| | EGRFTISRDNAKSTLYLQLNSLKTEDTAMYYC | |
| | TKGYGDGTPAPGQGTQVTVSS | |
| hIL2Rg_ | QVQLQESGGGAVQAGGSLRLSCAASGFTFSNA | 281 |
| VHH-6 | HMSWVRQAPGKGREWISSIYSGGSTWYADSVK | |
| | GRFTISRDNSKNTLYLQLNSLKTEDTAMYYCA | |
| | ENRLHYYSDDDSLRGQGTQVTVSS | |
| hIL2Rg_ | QVQLQESGGGLVQPGGSLRLSCAASGFTFDDR | 282 |
| VHH-7 | EMNWYRQAPGNECELVSTISSDGSTYYADSVK | |
| | GRFTISQDNAKNTVYLQMDSVKPEDTAVYYCA | |
| | ADFMIAIQAPGAGCWGQGTQVTVSS | |
| hIL2Rg_ | QVQLQESGGGSVQAGGSLRLSCVASGYTFSSY | 283 |
| VHH-8 | CMGWFRQAPGKEREGVAALGGGSTYYADSVKG | |
| | RFTISQDNAKNTLYLQMNSLKPEDTAMYYCAA | |
| | AWVACLEFGGSWYDLARYKHWGQGTQVTVSS | |
| hIL2Rg_ | QVQLQESGGGSVQAGGSLRLSCTASGFTFDDS | 284 |
| VHH-9 | DMGWYRQAPGGECELVTISSDGSTYYADSVKG | |
| | RFTISQDNAKNTVYLQMNSLKPEDTAVYYCAA | |
| | EPRGYYSNYGGRRECNYWGQGTQVTVSS | |
| hIL2Rg_ | QVQLQESGGGSVQAGGSLRLSCAASGSIYSSA | 285 |
| VHH-10 | YIGWFRQAPGKKREGVAGIYTRDGSTAYADSV | |
| | KGRFTISQDSAKKTVYLQMNSLKPEDTAMYYC | |
| | AAGRRTKSYVYIFRPEEYNYWGQGTQVTVSS | |
| hIL2Rg_ | QVQLQESGGGSVQAGGSLRLSCAASGFTFSSA | 286 |
| VHH-11 | HMSWVRQAPGKGREWIASIYSGGGTFYADSVK | |
| | GRFTISRDNAKNTLYLQLNSLKTEDTAMYYCA | |
| | TNRLHYYSDDDSLRGQGTQVTVSS | |
| hIL2Rg_ | QVQLQESGGGSVQAGGSLRLSCAASGFTFSNA | 287 |
| VHH-12 | HMSWVRQAPGKGREWISSIYSGGSTWYADSVK | |
| | GRFTISRDNSKNTLYLQLNSLKTEDTAMYYCA | |
| | ENRLHYYSDDDSLRGQGTQVTVSS | |
| hIL2Rg_ | QVQLQESGGGSVQAGGSLRLSCTASRFIFDDS | 288 |
| VHH-13 | DMGWYRQAPGNECELVSTISSDGSTYYADSVK | |
| | GRFTISRDNAKNTVYLQMNSLKPEDTAVYYCA | |
| | AEPRGYYSNYGGRRECNYWGQGTQVTVSS | |
| hIL2Rg_ | QVQLQESGGGSVQAGGSLKLSCTVSGFTADDS | 289 |
| VHH-14 | DMGWYRQGPGNECELVTISSDGSTYYADSVKG | |
| | RFTISQDNAKNTVYLQMNSLKPEDTAVYYCAA | |
| | EPRGYYSNYGGRRECNYWGQGTQVTVSS | |
| hIL2Rg_ | QVQLQESGGGLVQPGGSLRLSCAASGFTFSSA | 290 |
| VHH-15 | HMSWVRQAPGKGREWIASIYSGGGTFYADSVK | |
| | GRFTISRDNAKNTLYLQLNSLKAEDTAMYYCA | |
| | TNRLHYYSDDDSLRGQGTQVTVSS | |
| hIL2Rg_ | QVQLQESGGGLVQPGGSLRLSCVASGFTFSNA | 291 |
| VHH-16 | HMSWVRQAPGKGREWISSIYSGGSTWYADSVK | |
| | GRFTISRDNSKNTLYLQLNSLKTEDTAMYYCA | |
| | ENRLHYYSDDDSLRGQGTQVTVSS | |
| hIL2Rg_ | QVQLQESGGGLVQPGGSLRLSCAASGFTFSNA | 292 |
| VHH-17 | HMSWVRQAPGKGREWISSIYSGGSTWYADSVK | |
| | GRFTISRDNSKNTLYLQLNSLKTEDTAMYYCA | |
| | ENRLHYYSDDDSLRGQGTQVTVSS | |
| hIL2Rg_ | QVQLQESGGGLVQPGGSLRLSCAASGFTFSSY | 293 |
| VHH-18 | PMTWARQAPGKGLEWVSTIASDGGSTAYAASV | |
| | EGRFTISRDNAKSTLYLQLNSLKTEDTAMYYC | |
| | TKGYGDGTPAPGQGTQVTVSS | |
| hIL2Rg_ | QVQLQESGGGSVQAGGSLRLSCTASGFTFDDR | 294 |
| VHH-19 | EMNWYRQAPGNECELVSTISSDGSTYYADSVK | |
| | GRFTISQDNAKNTVYLQMDSVKPEDTAVYYCA | |
| | ADFMIAIQAPGAGCWGQGTQVTVSS | |
| hIL2Rg_ | QVQLQESGGGSVQAGGSLRLSCTASGFTFDDS | 295 |
| VHH-20 | DMGWYRQAPGNECELVSTISSDGSTYYADSVK | |
| | GRFTISQDNAKNTVYLQMNSLKPEDTAVYYCA | |
| | AEPRGYYSNYGGRRECNYWGQGTQVTVSS | |
| hIL2Rg_ | QVQLQESGGGSVQAGGSLRLSCVASGYTSCMG | 296 |
| VHH-21 | WFRQAPGKEREAVATIYTRGRSIYYADSVKGR | |
| | FTISQDNAKNTLYLQMNSLKPEDIAMYSCAAG | |
| | GYSWSAGCEFNYWGQGTQVTVSS | |
| hIL2Rg_ | QVQLQESGGGLVQPGGSLRLSCTASGFSFSSY | 297 |
| VHH-22 | PMTWARQAPGKGLEWVSTIASDGGSTAYAASV | |
| | EGRFTISRDNAKSTLYLQLNSLKTEDTAMYYC | |
| | TKGYGDGTPAPGQGTQVTVSS | |
| hIL2Rg_ | QVQLQESGGGLVQPGGSLRLSCAASGFSFSSY | 298 |
| VHH-23 | PMTWARQAPGKGLEWVSTIASDGGSTAYAASV | |
| | EGRFTISRDNAKSTLYLQLNSLKTEDTAMYYC | |
| | TKGYGDGTPAPGQGTQVTVSS | |

TABLE 15
murine anti-IL2Rg VHH Amino Acid Sequences

| | VHH AA Sequence | SEQ ID |
|---|---|---|
| Name | (CDRs Underlined) | NO: |
| mIL2Rg_ | QVQLQESGGGSVLAGGSLRLSCVASGYGYNYIGWFRQTPGKERE | 299 |
| VHH1 | GVAVIYTGGGDTYYADSVKGRFTASRDNAKSTLYLQMNSLEPED | |
| | TAMYYGVARYCVGSVYACLRGGHDEYAHWGQGTQVTVSS | |
| mIL2Rg_ | QVQLQESGGGSVQPGGSLRLSCAASGSTYANYLMGWFRQAPGKE | 300 |
| VHH2 | REGVAAIYSGGGSTYYADSVKGRFTISQDNAKNTLYLQMNSLKP | |
| | EDTAMYYCAAASAVKGDKGDIVVVVTGTQRMEYDYWGHGTQVTV | |
| | SS | |
| mIL2Rg_ | QVQLQESGGGSVQAGASLRLSCSVSGFTFDESVMSWLRQGPGNE | 301 |
| VHH3 | CDAVAIISSDDNTYYDDSVKGRFTISEDNAKNMVYLQMNSLKPE | |
| | DTAVYYCAARRRRPVYDSDYELRPRPLCGDFGVWGQGTQVTVSS | |
| mIL2Rg_ | QVQLQESGGGSVQAGGSLRLSCIGSGLPFDEDDMGWYRQAPGNE | 302 |
| VHH4 | CELVSSISSDGTAYYADSVKGRFTISRDNAKNTVLLQMNSLKPE | |
| | DTAVYYCAAGVHRQFGGSSSCGDAFYGMDYWGKGTQVTVSS | |
| mIL2Rg_ | QVQLQESGGGSVQAGGSLRLSCVASGDVYGRNSMAWFRQAPGKE | 303 |
| VHH5 | REGVAVGYSVVTTTYYADSVKGRFTISEDNDKNTVYLEMNSLKP | |
| | EDTAMYYCAADGNLWRGLRPSEYTYWGQGTQVTVSS | |
| mIL2Rg_ | QVQLQESGGGSVQAGGSLRLSCATSGFPYSRYCMGWFRQAPGKE | 304 |
| VHH6 | REGVAAIEPDGSTSYADSVKGRFTISQDNAVNTLYLQMNNLKPE | |
| | DTAMYYCAADERCFYLKDYDLRRPAQYRYWGQGTQVTVSS | |
| mIL2Rg_ | QVQLQESGGGLVQPGGSLRLSCTVSGFTFDESDMGWLRQNPGNE | 305 |
| VHH7 | CGVVSVITSDDNPYYDDSVKGRFTISEDNAKNMVYLQMNSLKPE | |
| | DTGVYYCATRSRQPVYSRDYELRPRPLCGDFGVWGQGTQVTVSS | |
| mIL2Rg_ | QVQLQESGGGSVQAGGSLRLSCTASGFTFDDFDMGWYRQAPGNE | 306 |
| VHH8 | CELVSTISDDGSTYYADSVKGRSSISRDNAKNTVYLQMNRLKPE | |
| | DTGVYYCAAEGALGSKTNCGWVGNFGYWGQGTQVTVSS | |
| mIL2Rg_ | QVQLQESGGGSVQAGGSLRLSCAASGFTFDDFDMGWYRQAPGNE | 307 |
| VHH9 | CELVSTISDDGSTYYADSVKGRSSISRDNAKNTVYLQMNSLKPE | |
| | DTAVYYCAAEGALGSKTNCGWVGNFGYWGQGTQVTVSS | |
| mIL2Rg_ | QVQLQESGGGLVQPGGSLRLSCAASGFTFDDFDMGWYRQAPGNE | 308 |
| VHH10 | CELVSTISDDGSTYYADSVKGRSSISRDNAKSTVYLQMNRLKPE | |
| | DTGVYYCAAEGALGSKTNCGWVGNFGYWGQGTQVTVSS | |
| mIL2Rg_ | QVQLQESGGGLVQPGGSLKLSCAASGFTFSDRDMGWYRQAPGNE | 309 |
| VHH11 | CERVSTISDDGSTYYADSVKGRSSISRDNAKNTVYLQMNSLKPE | |
| | DTAVYYCAAEGALGSKTNCGWVGNFGYWGQGTQVTVSS | |
| mIL2Rg_ | QVQLQESGGGSVLAGGSLRLSCVASGYGYNYIGWFRQTPGKERE | 310 |
| VHH12 | GVAVIYIGGGDTYYADSVKGRFTASRDNAKSTLYLQMNSLEPED | |
| | TAMYYCVARYCVGSVYACLRGGHDEYAHWGQGTQVTVSS | |
| mIL2Rg_ | QVQLQESGGGSVLAGGSLRLSCVASGYGYNYIGWFRQTPGKERE | 311 |
| VHH13 | GVAVIYTGGGDTYYADSVKGRFTASRDNAKSTLYLQMNSLEPED | |
| | TAMYYCVARYCVGSVYACLRGGHDEYAHWGQGTQVTVSS | |
| mIL2Rg_ | QVQLQESGGGSVQAGGSLRLSCAASGFTFDDFDMGWYRQAPGNE | 312 |
| VHH14 | CELVSTISDDGSTYYANSVKGRSSISRDNAKNMVYLQMNSLKPE | |
| | DTAVYYCAAEGALGSKTNCGWVGNFGYWGQGTQVTVSS | |
| mIL2Rg_ | QVQLQESGGGSVQAGGSLRLSCTASGFTFDDFDMGWYRQAPGNE | 313 |
| VHH15 | CELVSTISDDGSTYYADSVKGRSSISRDNAKNTVYLQMNRLKPE | |
| | DTGVYYCAAEGALGSKMNCGWVGNFGYWGQGTQVTVSS | |

TABLE 16
anti-IL10Ra sdAb VHH DNA SEQUENCE

| hIL10Ra VHH DNA Sequences | | SEQ ID |
|---|---|---|
| Name | Sequence | NO: |
| hIL10Ra_VHH1 | CAGGTTCAGCTTCAGGAGTCCGGTGGAGGCTCCA | 276 |
| | TCCAGGCCGGGGGCTCTCTCCGCCTGTCTTGCGCC | |
| | GCTTCCAGATACCTCTACAGTATCGACTACATGG | |
| | CTTGGTTTCGTCAGAGCCCAGGAAAAGAGCGGGA | |
| | ACCCGTGGCAGTAATCTACACTGCCTCAGGTGCC | |
| | ACATTTTACCCCGACTCTGTCAAGGGCAGGTTCA | |
| | CCATCTCTCAGGATAATGCCAAGATGACAGTGTA | |
| | CTTGCAGATGAACTCCCTGAAATCTGAGGATACC | |
| | GCTATGTATTACTGTGCCGCAGTGCGCAAGACCG | |
| | ATTCTTACCTGTTCGACGCTCAGAGTTTTACCTAC | |
| | TGGGGCCAGGGCACTCAGGTCACCGTCAGCAGC | |
| hIL10Ra_VHH2 | CAGGTGCAGTTGCAGGAGTCCGGCGGGGGTTCCG | 277 |
| | TGCAAGCAGGCGGATCTCTGCGCCTGTCCTGCGT | |
| | GGCCTCTCGTTATTTGTATAGCACCAACTACATGG | |
| | CTTGGTTCCGTCAGTCCCCAGGCAAAGAGCGCGA | |
| | AGCCGTAGCCGTAATCTATACGGCCTCTGGGGCA | |
| | ACACTCTATACCGACTCAGTGAAGGGACGCTTCA | |
| | CGATTTCCCAAGACAATGCAAAGATGACCGTGTA | |
| | CTTGCAGATGAACCGCCTGAAGAGCGAGGACACG | |
| | GCTATGTATTACTGCGCAGCCGTGCGCAAGACCG | |
| | ACTCCTACTTGTTTGACGCTCAGTCCTTCACTTAT | |
| | TGGGGCCAGGGTACACAGGTCACCGTGAGCAGT | |
| hIL10Ra_VHH3 | CAAGTACAGCTCCAGGAGAGCGGCGGTGGATCTA | 278 |
| | TCCAAGCAGGGGGTAGCCTTAGGTTGTCCTGTGT | |
| | GGCGTCCAGATACCTGTATAGCACGAACTACATG | |
| | GCATGGTTCAGACAGTCCCCAGGCAAGGAACGCG | |
| | AGGCAGTCGCCGTTATTTACACTGCATCTGGGGC | |
| | CACCCTCTATACGGACAGCGTGAAGGGAAGGTTT | |
| | ACAATCTCCCAGGACAACGCGAAGATGACCGTGT | |
| | ACCTTCAGATGAACCGCCTGAAGTCCGAGGACAC | |
| | CGCCATGTATTACTGTGCAGCGGTGCGCAAGACC | |
| | GACAGCTATCTGTTCGACGCGCAGTCATTCACTTA | |
| | TTGGGGCCAAGGAACCCAAGTGACCGTCAGCTCA | |
| hIL10Ra_VHH4 | CAGGTGCAGCTCCAAGAGTCCGGGGGAGGCTCTA | 279 |
| | TCCAGGCGGGAGGCAGTCTGCGCTTGTCCTGCGC | |
| | CGCAAGTCGTTATCTGTACTCCATTGATTACATGG | |
| | CATGGTTCCGCCAGTCCCCAGGTAAGGAACGTGA | |
| | ACCTGCCGCTGTGATCTACACCGCTTCTGGAGCA | |
| | ACCTTTTATCCTGATAGCGTTAAGGGTCGCTTCAC | |
| | CATCTCTCAGGATAACGCCAAAATGACAGTGTAC | |
| | CTCCAGATGAACAGCCTGAAGTCTGAGGACACTG | |
| | CCATGTACTATTGTGCGGCTGTGCGCAAGACCGA | |
| | CTCCTATCTGTTTGATGCACAGAGCTTTACCTATT | |
| | GGGGTCAGGGCACCCAGGTGACTGTGTCTAGC | |
| hIL10Ra_VHH5 | CAGGTCCAGTTGCAGGAGTCCGGTGGAGGTTCCA | 280 |
| | TCCAGGCGGGTGGGTCCCTTCGTCTCTCCTGCGTG | |
| | GCCTCTAAGTACCTGTATTCAACCAACTACATGG | |
| | CATGGTTCAGACAGTCTCCCGGCAAAGAGCGTGA | |
| | GGCAGTGGCCGCGATCTATACAGCTTCTGGGGCC | |
| | ACCCTGTACTCTGATTCCAATAAGGGAAGGTTCA | |
| | CTATCTCACAGGATAACGCCAAAATGACCGTCTA | |
| | CCTTCAGATGAACAGCCTCAAGTCTGAAGACACG | |
| | GCAATGTATTACTGTGCAGCCGTGCGCAAAACTG | |
| | GGAGCTACCTGTTTGACGCTCAGTCTTTCACTTAT | |
| | TGGGGCCAGGGTACGCAGGTGACAGTCTCTTCT | |
| hIL10Ra_VHH6 | CAGGTGCAACTCCAGGAGAGCGGAGGCGGTTCTG | 281 |
| | TTCAGGCAGGAGGTTCCCTGAGACTGTCCTGTGC | |
| | CGCGTCTCGCTTTACGTATTCATCCTACTGCATGG | |
| | GATGGTTCAGACAAGCGCCGGGGAAAGAAAGGG | |
| | AAGGCGTGGCCTCCATTGACTCCGACGGCTCAAC | |
| | TTCATACACTGATAGCGTGAAAGGCCGGTTCACC | |
| | ATCTCTAAGGACAACGCGAAGAACACCCTGTATC | |
| | TCCAGATGAACAGCCTCAAGCCTGAGGATACTGC | |
| | CATGTACTATTGCGCACTCGACCTGATGTCTACTG | |
| | TGGTCCCAGGCTTCTGCGGGTTCCTGCTCTCTGCT | |
| | GGCATGGACTACTGGGGGAAGGGCACTCAGGTA | |
| | ACGGTTAGCTCC | |
| hIL10Ra_VHH7 | CAGGTGCAGCTTCAGGAATCTGGCGGGGGCTCCG | 282 |
| | TGCAGGCCGGGGGCTCCCTCAGACTTTCCTGTGC | |
| | CGTCTCCGGTTACACATTTAACAGTAACTGTATGG | |
| | GCTGGTTCCGCCAGGCACCAGGCAAGGAGAGGG | |
| | AAGGTGTGGCCACAATCTATACTGGTGTTGGGAG | |
| | TACGTACTATGCTGATTCCGTGAAAGGTCGCTTCA | |
| | CAATTTCCCAGGACAACGCGAAGAACACTGTGTA | |
| | CTTGCAGATGAATAGCCTGAAGCCTGAAGATACC | |
| | GCAATGTATTACTGCGCTGCCGAGCCACTCTCCC | |
| | GCGTATATGGTGGAAGTTGCCCCACCCCCACTTTC | |
| | GGTTACTGGGGCCAGGGCACTCAAGTGACCGTGT | |
| | CCTCT | |
| hIL10Ra_VHH8 | CAGGTTCAGCTTCAGGAGTCTGGGGGCGGTTCAG | 283 |
| | TGCAGGCTGGCGGTTCTCTCCGCCTGTCCTGCGCT | |
| | GCCAGCGGCTATACTTACAGCATGTACTGCATGG | |
| | GCTGGTTCCGGCAAGCCCCCGGCAAAGAGCGTGA | |
| | GGGCGTCGCTCAAATCAACAGCGACGGGTCAACC | |
| | AGCTACGCCGATTCTGTCAAGGGCAGATTTACTA | |
| | TCAGCAAGGACAACGCCAAAAACACACTGTACCT | |
| | CCAGATGAACTCTTTGAAGCCTGAGGACACCGCG | |
| | ATGTATTACTGCGCCGCTGACAGCCGCGTGTACG | |
| | GTGGCAGCTGGTATGAGAGGCTGTGCGGCCCGTA | |
| | CACCTACGAGTACAACTATTGGGGACAGGGCACG | |
| | CAGGTGACAGTTAGCTCC | |
| hIL10Ra_VHH9 | CAGGTGCAACTGCAAGAGAGTGGCGGAGGCTCC | 284 |
| | GTCCAGGCTGGAGGTTCCCTGCGGCTGTCTTGCG | |
| | CCGTCAGCGGCTACGCATATTCCACTTACTGTATG | |
| | GGTTGGTTCCGCCAGGCCCCTGGAAAGGAACGCG | |
| | AGGGTGTTGCCGCTATTGATAGCGGAGGCTCCAC | |
| | ATCCTATGCGGACTCCGTGAAAGGTCGTTTCACC | |
| | ATCTCCAAGGATAACGCCAAGAACACTCTGTACC | |
| | TGCGCATGAACTCTCTGAAGCCTGAGGACACTGC | |
| | CATGTATTACTGCGCCGCTGTGCCCCCTCCACCCG | |
| | ACGGGGGCTCTTGTCTGTTTCTTGGCCCGGAGATC | |
| | AAGGTGTCCAAGGCTGATTTCCGTTATTGGGGCC | |
| | AGGGAACTCAAGTCACCGTGTCTTCC | |
| hIL10Ra_VHH10 | CAGGTCCAGCTCCAGGAGTCCGGTGGAGGCTCCG | 285 |
| | TTCAGGCCGGTGGCAGCTTGCGTCTGAGCTGCGC | |
| | GGCTTCAAGATACCTGTACTCCATTGATTACATGG | |
| | CATGGTTCCGTCAGTCTCCTGGCAAGGAGCGCGA | |
| | GCCCGTCGCTGTGATCTATACCGCCAGCGGAGCC | |
| | ACGTTCTACCCTGATTCCGTCAAGGGCCGCTTCAC | |
| | CATTAGCCAAGACAACGCTAAGATGACGGTGTAC | |
| | CTCCAAATGAATAGCCTGAAAAGCGAGGACACA | |
| | GCGATGTATTACTGCGCCGCTGTTAGGAAAACTG | |
| | ATAGTTACCTGTTCGATGCACAGTCTTTCACTTAC | |
| | TGGGGGCAGGGCACCCAAGTTACCGTCTCCTCT | |
| hIL10Ra_VHH11 | CAGGTGCAGCTCCAGGAATCTGGAGGGGGCAGTG | 286 |
| | TGCAGGCCGGGGGCTCCCTGCGCTTGAGCTGTGG | |
| | AGCCAGCCGCTACACGTATTCCAGTTACTGTATG | |
| | GGCTGGTTCAGACAAGCTCCGGGTAAGGAGAGA | |
| | GAGGGAGTTGCCGTAATTGATTCTGACGGGTCCA | |
| | CTAGCTATGCGGATTCAGTCAAGGGCCGGTTCAC | |
| | CATCAGCAAGGACAATGGTAAGAACACACTGTAC | |
| | CTGCAAATGAACAGCCTGAAGCCCGAGGACACCG | |
| | CCATGTACTATTGTGCCGCTGATCTCGGACATTAC | |
| | CGCCCTCCCTGCGGTGTGCTCTATCTCGGGATGGA | |
| | CTATTGGGGTAAGGGCACCCAGGTGACCGTGTCC | |
| | TCT | |
| hIL10Ra_VHH12 | CAGGTGCAGCTCCAGGAAAGCGGCGGGGGTAGC | 287 |
| | GTTCAAGCAGGTGGGTCCCTGCGCTTGAGCTGTA | |
| | CTGTGTCCGGCTACACCTACTCAAGCAACTGCAT | |
| | GGGATGGTTCCGTCAGGCCCCTGGCAAGGAACGC | |
| | GAAGGCGTGGCTACTATCTACACCGGCGGTGGCA | |
| | ACACTTATTACGCCGACTCCGTTAAGGGGCGTTTC | |
| | ACTATCAGCCAAGACAACGCCAAGAACACCGTGT | |
| | ATCTGCAAATGAATAACCTGAAGCCTGAAGACAC | |
| | CGCCATGTATTACTGTGCTGCCGAGCCCCTTTCCC | |
| | GCGTTTACGGCGGTTCTTGTCCTACCCCTACCTTT | |
| | GACTACTGGGGTCAGGGAACACAGGTGACAGTGT | |
| | CCAGT | |
| hIL10Ra_VHH13 | CAAGTCCAACTCCAGGAATCTGGGGGAGGCTCCG | 288 |
| | TACAGGCTGGCGGTTCCCTTCGTCTGTCCTGTGCT | |
| | GTGTCAGGGTACTCCTACTCCAGTAACTGTATGG | |
| | GCTGGTTCCGGCAAGCCCCCGGAAAGGAGCGCGA | |
| | GGGCGTGGCTACCATCCACACAGGGGGCGGTTCC | |
| | ACATATTACGCCGATAGTGTCAAGGGCCGCTTCA | |
| | CCATTAGTCAGGACAACGCCAAGAATACCGTTTA | |
| | CCTTCAAATGAACTCTTTGAAACCTGAGGACACT | |
| | GCGATGTATTACTGTGCGGCAGAGCCTTTGTCCC | |
| | GCCTGTACGGGGGATCTTGTCCGACCCCGACTTTC | |
| | GGGTACTGGGGACAGGGCACCCAGGTGACAGTGT | |
| | CCTCC | |
| hIL10Ra_VHH14 | CAGGTGCAGTTGCAGGAAAGCGGGGGTGGCAGC | 289 |
| | GTCCAAGCCGGTGGCAGCCTGCGTCTGTCCTGCG | |
| | GTGCCTCCGGCTATACTTACTCCAGCTATTGCATG | |
| | GGTTGGTTCCGCCAAGTGCCAGGAAAGGAGCGTG | |
| | AGGGGGTGGCTGTAATTGATTCAGATGGGTCAAC | |
| | AAGCTACGCTGACAGCGTTAAAGGTCGCTTCACC | |
| | ATCAGTAAGGACAACGGCAAGAACACCCTCTACC | |
| | TGCAAATGAACTCCCTGAAGCCGGAGGATACCGC | |
| | AATGTATTACTGTGCCGCTGACTTGGGACACTAC | |
| | CGCCCTCCGTGCGGTGTGCTTTATCTGGGCATGGA | |
| | TTACTGGGGTAAGGGAACCCAAGTGACGGTGTCT | |
| | TCT | |
| hIL10Ra_VHH15 | CAGGTACAACTCCAGGAGTCTGGCGGTGGGTCCG | 290 |
| | TGCAGGCAGGTGGCAGCCTTCGCCTCTCCTGCGG | |
| | GGCCTCCGGGTACACCTATAGTGGCTACTGCATG | |
| | GGGTGGTTCAGGCAAGCCCCCGGTAAGGAACGTG | |
| | AGGGAGTTGCTGTGATTGATTCAGATGGGTCCAC | |
| | GAGTTACGCTGACTCCGTGAAAGGTAGGTTCACA | |
| | ATCTCCAAAGATAATGGCAAGAACACCCTCTACC | |
| | TTCAGATGAATAGCCTGAAGCCAGAAGACACCGC | |
| | CATGTATTACTGTGCTGCCGACCTGGGACACTATC | |
| | GCCCTCCGTGCGGGGTCCTGTACTTGGGCATGGA | |
| | CTATTGGGGCAAGGGGACCCAGGTGACTGTGTCC | |
| | TCT | |
| hIL10Ra_VHH16 | CAGGTGCAGTTGCAGGAATCCGGTGGAGGCTCTG | 291 |
| | TTCAGGCCGGGGGCTCTCTCCGCCTGGCCTGCGC | |
| | AGCCTCCAGGTATACTTACAGCAACTACTGCATG | |
| | GGGTGGTTTCGCCAGGCTCCGGGCAAAGAGCGTG | |
| | AGGGAGTGGCTACTATTGATTCCGATGGAAACAC | |
| | CAGCTACGCCGATAGCGTGAAGGGCAGATTTACT | |
| | ATCAGCAGAGATAACGCTAAAAACACGTTGTACC | |
| | TCCAGATGAACTCACTCAAGCCGGGGGACACAGC | |
| | TATGTATTACTGCGCAGCCGATCTGGGTCACTACC | |
| | GCCCGCCCTGCGGCGCATATTACTATGGCATGGA | |
| | CTACTGGGGCAAGGGCACCCAGGTGACCGTGTCC | |
| | AGT | |
| hIL10Ra_VHH17 | CAGGTGCAGCTCCAAGAGTCTGGCGGGGGTTCCG | 292 |
| | TGCAAGCCGGTGGCTCACTCAGGTTGAGTTGCGC | |
| | AGCCAGCGGCTATAGCAACTGTTCCTATGACATG | |
| | ACTTGGTATCGCCAGGCCCCTGGCAAAGAGCGTG | |
| | AGTTCGTGTCAGCTATTCACTCCGACGGCTCCACT | |
| | CGTTATGCGGACTCTGTGAAGGGCCGGTTTTTCAT | |
| | CTCCCAGGACAACGCTAAAAACACTGTCTATTTG | |
| | CAGATGAACTCTCTGAAACCCGAAGATACCGCCA | |
| | TGTACTATTGCAAAACCGATCCTCTGCATTGTCGC | |
| | GCCCACGGCGGGAGTTGGTACTCTGTGCGGGCCA | |
| | ACTATTGGGGCCAGGGCACCCAGGTCACCGTGTC | |
| | CTCA | |
| hIL10Ra_VHH18 | CAGGTACAACTCCAGGAGTCTGGCGGTGGCAGCG | 293 |
| | TGCAGGCAGGCGGAAGCCTGAGGCTGTCCTGCGC | |
| | TGTATCTGGCTACACTTATAATTCCAACTGCATGG | |
| | GTTGGTTTCGGCAGGCTCCAGGTAAGGAGCGCGA | |
| | GGGCGTCGCCACCATTTATACAGGTGTTGGCAGC | |
| | ACATATTACGCCGACAGCGTGAAGGGAAGGTTCA | |
| | CCATCTCCCAAGACAATGCGAAAAACACAGTGTA | |
| | TCTCCAGATGAATAGCCTGAAGCCCGAGGACACG | |
| | GCTATGTATTACTGCGCTGCCGAGCCACTGAGCA | |
| | GAGTGTATGGGGGCAGCTGTCCTACACCCACTTT | |
| | CGGCTATTGGGGTCAAGGCACCCAGGTTACAGTC | |
| | AGCTCC | |

TABLE 17
anti-IL2Rg VHH DNA sequences

| Name | Sequence | SEQ ID NO: |
|---|---|---|
| hIL2Rg_VHH-1 | CAGGTCCAGCTCCAGGAGAGCGGGGG | 294 |
| | CGGTTCTGTGCAAGCCGGAGGCTCATT | |
| | GAGACTCTCATGCGCTGCAAGTGGTTT | |
| | TACCTTCGATGACAGCGATATGGGATG | |
| | GTATCGTCAGGCTCCGGGCAATGAGTG | |
| | TGATCTGGTCTCCACTATCTCCTCTGAT | |
| | GGTTCCACATACTATGCTGACTCTGTCA | |
| | AGGGGCGCTTTACCATCTCCCAAGATA | |
| | ATGCCAAGAACACCGTGTACCTTCAGA | |
| | TGGATTCAGTTAAGCCCGAGGACACAG | |
| | CCGTCTATTACTGCGCTGCGGATTTTAT | |
| | GATTGCCATCCAAGCTCCCGGAGCGGG | |
| | ATGCTGGGGCCAGGGAACCCAGGTCAC | |
| | TGTGAGCAGT | |
| hIL2Rg_VHH-2 | CAGGTGCAGTTGCAGGAGTCCGGCGGG | 295 |
| | GGTTCTGTGCCAGCGGGTGGGAGCCTC | |
| | AAGCTCTCCTGTGCCGCTTCCGGCTTCT | |
| | CATTCTCCTCTTACCCTATGACCTGGGC | |
| | ACGCCAAGCGCCCGGCAAGGGACTGG | |
| | AATGGGTGTCCACCATTGCTTCCGATG | |
| | GCGGTAGTACAGCCTACGCCGCGTCAG | |
| | TGGAGGGTCGGTTCACGATCAGCCGGG | |
| | ACAACGCGAAGAGCACACTCTACCTCC | |
| | AGCTGAACTCTCTGAAGACCGAGGACA | |
| | CCGCCATGTACTATTGCACAAAGGGCT | |
| | ACGGCGACGGCACCCCGGCACCCGGCC | |
| | AGGGCACCCAGGTGACAGTCTCTTCC | |
| hIL2Rg_VHH-3 | CAGGTGCAGTTGCAGGAAAGTGGTGGA | 296 |
| | GGGAGTGTGCAGACTGGGGGCTCTCTC | |
| | CGCCTCAGCTGCACAGCCTCTGGATTT | |
| | ACCTTCGATGATCGCGAGATGAACTGG | |
| | TATCGCCAGGCTCCGGGAAACGAGTGC | |
| | GAACTGGTGTCTACAATCAGTTCTGAC | |
| | GGGTCCACCTATTACGCTGATAGTGTC | |
| | AAGGGCCGCTTCACTATCTCTCAGGAC | |
| | AACGCGAAGAACACCGTTTACTTGCAG | |
| | ATGGATAGCGTGAAGCCTGAAGATACA | |
| | GCGGTGTATTACTGCGCTGCCGACTTT | |
| | ATGATTGCCATCCAGGCACCGGGGGCG | |
| | GGGTGTTGGGGACAGGGAACTCAGGTG | |
| | ACTGTGTCCTCC | |
| hIL2Rg_VHH-4 | CAGGTTCAACTCCAAGAGAGTGGTGGC | 297 |
| | GGAAGCGTGCAGGCGGGCGGTTCTCTG | |
| | CGTCTGAGTTGCACTGCCAGCGGATTT | |
| | ACCTTCGACGATTCCGACATGGGATGG | |
| | TACAGACAGGCCCCTGGTAACGAGTGC | |
| | GAACTCGTGAGTACTATCAGCTCCGAC | |
| | GGCAACACCTATTACACCGATTCTGTG | |
| | AAGGGCAGGTTCACCATCTCCCAGGAC | |
| | AACGCTAAGAACACTGTGTACCTGCAA | |
| | ATGAATAGCCTGGGACCCGAGGACACA | |
| | GCGGTCTATTACTGCGCGGCAGAGCCG | |
| | CGCGGCTATTACAGCAACTACGGCGGT | |
| | AGACGCGAGTGCAACTACTGGGGGCA | |
| | GGGGACGCAAGTGACTGTCTCCTCC | |
| hIL2Rg_VHH-5 | CAAGTGCAGCTTCAGGAGTCCGGGGGT | 298 |
| | GGCAGCGTCCAGGCTGGGGGCAGCTTG | |
| | CGCCTGTCTTGCGCTGCGTCTGGGTTCA | |
| | GCTTTAGCTCCTACCCTATGACCTGGGC | |
| | TAGACAGGCCCCCGGCAAGGGGCTGG | |
| | AGTGGGTGAGTACAATCGCCTCCGACG | |
| | GAGGTAGTACGGCCTACGCAGCGTCCG | |
| | TCGAGGGTCGCTTCACCATCAGCCGGG | |
| | ATAACGCTAAGTCCACCCTGTACCTTC | |
| | AGCTCAATTCTCTCAAAACGGAGGATA | |
| | CCGCCATGTACTATTGCACCAAGGGAT | |
| | ATGGCGACGGCACCCCAGCTCCTGGAC | |
| | AGGGCACACAGGTCACCGTTAGCTCC | |
| hIL2Rg_VHH-6 | CAGGTCCAGCTTCAGGAGTCTGGCGGG | 299 |
| | GGCGCAGTACAGGCAGGGGGTTCTCTG | |
| | CGTCTGTCCTGCGCCGCGTCCGGCTTTA | |
| | CTTTCAGCAACGCACACATGAGTTGGG | |
| | TGCGCCAAGCGCCCGGCAAGGGCCGG | |
| | GAATGGATCAGTAGCATCTACAGTGGA | |
| | GGCAGCACATGGTACGCCGACTCTGTT | |
| | AAGGGTCGTTTTACGATCTCTCGTGAC | |
| | AACTCCAAGAACACTTTGTACCTCCAG | |
| | CTCAATTCTCTCAAGACCGAGGACACC | |
| | GCGATGTACTATTGTGCCGAGAACAGG | |
| | CTGCACTACTATTCCGACGATGACTCTC | |
| | TCAGGGGCCAGGGAACTCAAGTTACCG | |
| | TGTCCAGC | |
| hIL2Rg_VHH-7 | CAAGTGCAGCTCCAAGAGAGTGGTGGC | 300 |
| | GGGCTGGTTCAGCCAGGGGGCAGCTTG | |
| | AGACTCTCCTGCGCAGCTTCAGGCTTT | |
| | ACCTTCGATGACCGTGAGATGAACTGG | |
| | TATCGTCAGGCCCCAGGCAACGAGTGT | |
| | GAGCTGGTTAGCACGATTTCTTCCGAC | |
| | GGTTCCACCTATTACGCCGACTCTGTG | |
| | AAGGGACGTTTCACTATCTCCCAGGAC | |
| | AATGCCAAGAACACCGTGTACCTCCAG | |
| | ATGGACAGCGTGAAGCCGGAGGATACT | |
| | GCTGTGTATTACTGCGCTGCCGACTTTA | |
| | TGATCGCCATCCAGGCCCCTGGCGCGG | |
| | GTTGCTGGGGCCAGGGCACTCAGGTGA | |
| | CCGTGTCTTCC | |
| hIL2Rg_VHH-8 | CAAGTGCAACTGCAAGAGTCCGGCGGT | 301 |
| | GGATCTGTGCAGGCCGGAGGCAGCCTG | |
| | CGGCTGAGCTGTGTAGCTTCCGGGTAT | |
| | ACCTTTAGCTCATACTGTATGGGCTGGT | |
| | TTCGTCAGGCCCCCGGTAAGGAGCGCG | |
| | AGGGCGTGGCCGCTCTTGGTGGAGGCT | |
| | CCACCTATTACGCCGATTCCGTGAAGG | |
| | GCAGGTTTACTATCTCCCAGGACAACG | |
| | CGAAGAATACGCTCTATCTCCAGATGA | |
| | ATAGCCTGAAGCCCGAGGATACAGCTA | |
| | TGTATTACTGTGCTGCCGCTTGGGTAGC | |
| | CTGCCTGGAGTTCGGTGGCTCCTGGTA | |
| | CGATCTGGCACGGTACAAACATTGGGG | |
| | GCAGGGCACCCAGGTCACCGTGTCTAG | |
| | C | |
| hIL2Rg_VHH-9 | CAGGTCCAGTTGCAGGAATCTGGGGGC | 302 |
| | GGTTCCGTACAAGCAGGTGGCTCCCTT | |
| | CGGTTGAGCTGTACCGCATCCGGCTTT | |
| | ACTTTCGACGATAGCGATATGGGCTGG | |
| | TATCGTCAGGCCCCAGGGGGCGAGTGC | |
| | GAGCTGGTTACAATCTCCTCTGACGGC | |
| | AGTACCTATTACGCAGACTCCGTCAAG | |
| | GGCAGGTTCACTATCAGTCAGGACAAT | |
| | GCAAAGAACACTGTGTATCTCCAGATG | |
| | AACTCTCTGAAGCCAGAAGATACTGCC | |
| | GTGTATTACTGCGCTGCGGAACCGAGA | |
| | GGCTATTACTCTAATTATGGCGGGCGT | |
| | CGGGAGTGTAATTATTGGGGACAGGGA | |
| | ACCCAGGTGACCGTGTCCTCC | |
| hIL2Rg_VHH-10 | CAGGTGCAGCTCCAGGAGAGTGGCGG | 303 |
| | AGGCTCCGTGCAGGCTGGGGGCTCTCT | |
| | GCGTCTGAGCTGTGCCGCAAGCGGTAG | |
| | CATTTACAGCTCTGCCTACATCGGGTG | |
| | GTTTCGTCAAGCGCCGGGCAAAAAGCG | |
| | CGAAGGCGTGGCCGGAATCTACACGCG | |
| | CGATGGCTCCACCGCTTATGCTGACAG | |
| | CGTTAAGGGACGTTTTACGATCAGCCA | |
| | GGACTCTGCCAAAAAGACTGTGTATCT | |
| | CCAGATGAACTCCCTGAAACCTGAGGA | |
| | CACAGCCATGTATTACTGCGCCGCTGG | |
| | CCGCCGTACAAAGAGCTATGTTTACAT | |
| | CTTTCGCCCCGAAGAGTACAACTACTG | |
| | GGGCCAGGGAACCCAAGTGACTGTGTC | |
| | CAGT | |
| hIL2Rg_VHH-11 | CAGGTTCAGTTGCAGGAGTCCGGCGGA | 304 |
| | GGCAGCGTGCAGGCCGGAGGCTCCTTG | |
| | CGCTTGTCCTGTGCGGCTTCTGGCTTCA | |
| | CCTTCTCATCTGCTCACATGAGTTGGGT | |
| | GCGTCAGGCCCCAGGGAAAGGTCGCG | |
| | AGTGGATTGCCTCCATCTACAGCGGTG | |
| | GGGGCACTTTTTATGCGGACAGCGTGA | |
| | AGGGCCGCTTTACCATCAGCCGTGACA | |
| | ACGCTAAGAACACCCTGTATCTCCAAC | |
| | TCAATTCCCTCAAGACCGAGGATACAG | |
| | CGATGTACTATTGTGCAACCAACCGCC | |
| | TTCACTATTACTCCGACGATGACAGCC | |
| | TGCGCGGACAGGGGACCCAGGTGACG | |
| | GTGTCCAGC | |
| hIL2Rg_VHH-12 | CAGGTGCAACTCCAGGAAAGTGGCGG | 305 |
| | AGGCTCAGTGCAGGCAGGTGGCTCTCT | |
| | CCGCCTTTCCTGCGCTGCCAGCGGATTC | |
| | ACCTTCTCTAACGCTCACATGAGCTGG | |
| | GTTCGTCAGGCTCCCGGCAAAGGCCGT | |
| | GAATGGATTAGCTCCATCTATAGTGGC | |
| | GGAAGTACTTGGTACGCAGATAGCGTC | |
| | AAGGGCCGCTTCACTATTAGTCGGGAT | |
| | AACTCCAAGAACACTCTGTACCTCCAG | |
| | CTGAACTCATTGAAAACCGAGGACACG | |
| | GCTATGTACTATTGTGCTGAGAACAGG | |
| | CTGCACTATTACTCCGACGATGACTCTC | |
| | TGAGGGGTCAGGGCACCCAGGTGACCG | |
| | TCAGCTCC | |
| hIL2Rg_VHH-13 | CAGGTCCAACTCCAGGAGTCCGGCGGA | 306 |
| | GGCAGCGTGCAGGCTGGAGGCTCTCTC | |
| | CGCCTGAGCTGCACAGCTTCCAGATTC | |
| | ATCTTCGATGACTCCGACATGGGCTGG | |
| | TATCGCCAGGCTCCAGGGAACGAGTGC | |
| | GAACTGGTGAGCACCATCTCTTCAGAC | |
| | GGTAGCACCTATTACGCCGACAGTGTG | |
| | AAGGGGCGCTTCACCATCTCCCGCGAC | |
| | AATGCTAAAAATACGGTGTATCTCCAG | |
| | ATGAACTCCCTCAAACCGGAGGACACA | |
| | GCTGTATATTACTGTGCTGCGGAACCA | |
| | CGGGGCTACTATAGCAACTATGGTGGA | |
| | AGGCGCGAGTGCAACTACTGGGGTCAG | |
| | GGCACACAGGTGACGGTTTCCTCC | |
| hIL2Rg_VHH-14 | CAGGTGCAGCTCCAGGAGAGCGGCGGT | 307 |
| | GGCTCCGTGCAGGCTGGTGGCAGCCTG | |
| | AAGCTGTCCTGCACCGTGAGTGGCTTC | |
| | ACAGCCGACGATTCTGATATGGGCTGG | |
| | TATCGCCAAGGCCCCGGCAATGAGTGC | |
| | GAGCTGGTAACCATTAGCTCAGACGGC | |
| | TCTACATACTATGCCGATTCTGTTAAGG | |
| | GCCGCTTTACTATCTCACAGGATAATG | |
| | CCAAGAACACAGTGTACTTGCAGATGA | |
| | ACTCTCTGAAACCGGAAGACACAGCTG | |
| | TGTATTACTGTGCTGCGGAGCCTAGAG | |
| | GGTATTACAGCAATTACGGGGGCCGGA | |
| | GAGAGTGTAACTATTGGGGGCAGGGCA | |
| | CCCAAGTGACCGTTTCCTCC | |
| hIL2Rg_VHH-15 | CAGGTCCAGCTTCAGGAATCTGGGGGC | 308 |
| | GGTCTCGTGCAGCCCGGCGGGTCCCTG | |
| | CGTCTGTCTTGTGCTGCGAGCGGCTTCA | |
| | CGTTCTCAAGTGCCCACATGAGCTGGG | |
| | TAAGGCAGGCACCGGGCAAGGGGCGC | |
| | GAGTGGATTGCAAGCATCTATTCAGGC | |
| | GGGGGCACATTCTACGCCGACAGCGTG | |
| | AAGGGACGTTTTACAATCTCCAGAGAT | |
| | AACGCAAAGAACACTCTCTACCTCCAA | |
| | CTCAACTCCTTGAAGGCGGAAGATACT | |
| | GCAATGTATTACTGTGCTACTAACCGT | |
| | CTTCATTATTACTCTGACGATGACTCCC | |
| | TGCGGGGGCAGGGTACACAGGTGACA | |
| | GTGAGTTCC | |
| hIL2Rg_VHH-16 | CAGGTGCAGCTGCAAGAATCTGGTGGA | 309 |
| | GGGCTGGTCCAGCCTGGGGGCTCCCTG | |
| | CGCCTCTCATGTGTCGCATCTGGCTTCA | |
| | CCTTCAGCAACGCCCACATGAGCTGGG | |
| | TTCGCCAAGCCCCTGGGAAGGGCCGGG | |
| | AGTGGATCTCCAGTATCTATTCCGGCG | |
| | GAAGCACTTGGTATGCAGACAGCGTCA | |
| | AAGGACGGTTCACTATTTCTCGTGATA | |
| | ATTCTAAGAACACCCTGTACCTTCAGC | |
| | TGAACAGCCTGAAGACCGAGGACACTG | |
| | CTATGTACTATTGTGCTGAGAATCGCCT | |
| | GCATTACTATAGCGACGATGACAGTCT | |
| | GCGCGGACAGGGGACCCAGGTCACCGT | |
| | GTCCTCT | |
| hIL2Rg_VHH-17 | CAGGTTCAGTTGCAGGAATCAGGAGGC | 310 |
| | GGTCTGGTGCAGCCTGGGGGCTCTCTG | |
| | CGTCTCTCCTGCGCCGCTTCCGGCTTCA | |
| | CATTCTCCAACGCCCACATGAGCTGGG | |
| | TCCGCCAGGCCCCTGGGAAGGGCCGCG | |
| | AGTGGATCTCCAGTATCTACAGCGGGG | |
| | GCTCCACTTGGTACGCAGACAGCGTCA | |
| | AAGGGAGGTTTACCATTAGCCGTGACA | |
| | ATTCTAAGAACACATTGTATTTGCAGC | |
| | TGAACTCTCTTAAAACCGAGGACACCG | |
| | CCATGTACTATTGTGCTGAGAACAGGC | |
| | TCCACTATTACTCAGACGATGACTCAC | |
| | TTCGCGGGCAGGGAACCCAGGTCACCG | |
| | TCTCCTCT | |
| hIL2Rg_VHH-18 | CAAGTCCAGCTCCAGGAAAGCGGCGGT | 311 |
| | GGCCTGGTGCAACCTGGCGGGTCTCTG | |
| | CGCTTGTCATGCGCTGCCTCCGGCTTCA | |
| | CCTTCTCATCTTACCCTATGACCTGGGC | |
| | GCGTCAGGCTCCCGGCAAGGGATTGGA | |
| | GTGGGTGTCTACTATTGCCTCCGACGG | |
| | TGGCAGCACGGCCTACGCAGCGTCTGT | |
| | AGAAGGACGCTTCACAATTAGCAGAGA | |
| | CAACGCAAAATCTACTTTGTACCTTCA | |
| | GCTCAACAGCCTGAAGACCGAAGACAC | |
| | AGCTATGTATTACTGCACAAAAGGCTA | |
| | CGGGGACGGCACGCCAGCGCCTGGAC | |
| | AGGGGACACAGGTGACCGTATCTTCT | |
| hIL2Rg_VHH-19 | CAGGTGCAGTTGCAGGAATCAGGGGGT | 312 |
| | GGCTCTGTGCAGGCCGGGGGCTCCCTG | |
| | CGTCTGTCCTGTACTGCGAGCGGCTTC | |
| | ACCTTTGATGACCGCGAGATGAACTGG | |
| | TATCGCCAGGCTCCGGGGAACGAGTGC | |
| | GAACTCGTGTCTACAATTAGCTCCGAT | |
| | GGTTCAACATACTATGCTGATTCTGTCA | |
| | AAGGTCGCTTTACCATCTCACAGGACA | |
| | ACGCCAAGAACACCGTCTACCTCCAGA | |
| | TGGACTCTGTGAAGCCTGAAGATACCG | |
| | CCGTATACTATTGCGCCGCTGACTTTAT | |
| | GATTGCCATTCAGGCTCCGGGTGCTGG | |
| | ATGCTGGGGTCAGGGGACTCAGGTGAC | |
| | CGTGTCTTCA | |
| hIL2Rg_VHH-20 | CAAGTGCAGTTGCAGGAAAGCGGCGGT | 313 |
| | GGGTCCGTGCAAGCCGGAGGTTCTCTC | |
| | CGCCTGTCTTGCACTGCCTCAGGTTTTA | |
| | CCTTCGACGATTCCGATATGGGCTGGT | |
| | ACAGGCAGGCTCCCGGCAATGAGTGCG | |
| | AGCTGGTGTCTACGATCTCAAGTGATG | |
| | GCTCCACCTACTATGCCGATAGCGTAA | |
| | AAGGAAGGTTTACTATTAGCCAGGATA | |
| | ACGCGAAGAACACGGTGTACCTCCAGA | |
| | TGAACAGTCTCAAGCCGGAGGATACTG | |
| | CCGTGTATTACTGTGCTGCCGAGCCGC | |
| | GTGGCTATTACTCCAACTACGGTGGCA | |
| | GACGTGAATGCAATTACTGGGGACAGG | |
| | GTACTCAGGTTACCGTGTCCTCT | |
| hIL2Rg_VHH-21 | CAGGTTCAACTTCAGGAATCCGGGGGC | 314 |
| | GGTTCCGTGCAAGCCGGGGGTAGCCTG | |
| | CGTCTGTCTTGCGTGGCCAGCGGCTAT | |
| | ACCTCCTGTATGGGTTGGTTTCGGCAG | |
| | GCTCCTGGGAAGGAGCGCGAAGCCGTG | |
| | GCGACCATCTACACACGGGGCCGCAGC | |
| | ATCTATTACGCTGACAGTGTGAAGGGC | |
| | CGCTTCACCATCTCCCAGGATAACGCC | |
| | AAGAATACCCTGTATCTGCAAATGAAC | |
| | TCCCTGAAGCCTGAGGACATCGCCATG | |
| | TATTCCTGCGCAGCTGGAGGGTACTCA | |
| | TGGTCCGCTGGGTGCGAGTTTAATTATT | |
| | GGGGCCAAGGAACCCAGGTGACCGTCT | |
| | CCTCA | |
| hIL2Rg_VHH-22 | CAAGTGCAGCTCCAGGAGTCTGGCGGG | 315 |
| | GGCCTGGTTCAGCCTGGTGGGTCCCTG | |
| | CGCCTGTCTTGCACGGCTTCCGGCTTTA | |
| | GCTTCTCCTCATATCCAATGACCTGGGC | |
| | ACGCCAGGCTCCTGGTAAGGGCCTGGA | |
| | GTGGGTCTCCACCATCGCCTCTGATGG | |
| | TGGGTCAACTGCCTATGCTGCCTCCGTC | |
| | GAGGGTAGATTCACAATCAGCAGAGAC | |
| | AACGCCAAATCCACGCTGTACCTGCAA | |
| | CTCAACTCCTTGAAGACCGAGGACACA | |
| | GCTATGTATTACTGTACCAAAGGCTAC | |
| | GGCGACGGCACTCCTGCTCCCGGACAG | |
| | GGGACCCAGGTGACTGTGTCTAGC | |
| hIL2Rg_VHH-23 | CAGGTCCAACTTCAGGAAAGCGGGGGT | 316 |
| | GGACTGGTACAGCCAGGGGGCAGTCTG | |
| | CGCCTGTCCTGTGCCGCAAGCGGGTTT | |
| | TCTTTCTCCAGTTACCCCATGACCTGGG | |
| | CTCGCCAAGCACCTGGAAAGGGACTGG | |
| | AGTGGGTGTCTACTATTGCGTCAGATG | |
| | GTGGGAGTACGGCTTACGCCGCGAGCG | |
| | TGGAGGGTCGTTTTACGATCAGTAGGG | |
| | ACAACGCCAAAAGCACTCTGTACCTCC | |
| | AGCTTAACAGCCTGAAGACCGAGGACA | |
| | CCGCCATGTATTACTGTACCAAGGGCT | |
| | ACGGAGACGGCACCCCTGCGCCGGGGC | |
| | AAGGCACCCAGGTGACCGTAAGTTCA | |

TABLE 18
murine anti-IL2Rg VHH DNA sequences

| Name | DNA Sequence | SEQ ID NO: |
|---|---|---|
| mIL2Rg_VHH1 | CAGGTGCAACTCCAGGAGTCCGGCGGGGGCTCCGT | 317 |
| | GCTGGCTGGCGGATCTTTGAGGCTGTCTTGCGTGG | |
| | CTTCTGGCTATGGCTATAATTACATCGGCTGGTTCC | |
| | GTCAGACACCCGGCAAGGAGCGCGAAGGGGTGGC | |
| | GGTCATTTACACAGGGGGTGGGGACACTTATTACG | |
| | CCGACTCCGTCAAGGGTAGGTTTACCGCTAGTCGC | |
| | GATAATGCCAAAAGTACGCTGTACCTGCAAATGAA | |
| | CAGCTTGGAGCCAGAGGACACCGCCATGTATTACG | |
| | GAGTGGCTCGCTACTGTGTGGGCAGTGTGTACGCT | |
| | TGCCTGCGCGGAGGCCACGACGAGTACGCACACTG | |
| | GGGCCAGGGAACCCAGGTGACAGTGTCTAGC | |
| mIL2Rg_VHH2 | CAGGTGCAGCTCCAGGAGTCTGGGGGTGGCAGCGT | 318 |
| | CCAGCCAGGTGGCTCATTGAGACTGTCTTGTGCTG | |
| | CATCTGGCTCCACCTACGCTAATTACCTGATGGGA | |
| | TGGTTCAGGCAGGCCCCTGGTAAGGAGCGTGAGG | |
| | GCGTGGCCGCTATCTATTCTGGCGGTGGGTCCACC | |
| | TACTATGCTGACTCCGTCAAGGGACGCTTCACTAT | |
| | TTCTCAAGACAATGCCAAGAACACTTTGTACTTGC | |
| | AAATGAACTCACTCAAACCTGAGGACACCGCGATG | |
| | TACTATTGCGCAGCGGCATCCGCAGTGAAGGGAGA | |
| | CAAAGGGGATATCGTGGTAGTTGTGACCGGCACCC | |
| | AGCGTATGGAGTACGACTACTGGGGACATGGCACC | |
| | CAGGTGACAGTTAGCTCC | |
| mIL2Rg_VHH3 | CAGGTACAGTTGCAGGAGAGTGGTGGGGGTTCCGT | 319 |
| | CCAGGCCGGTGCCTCTCTTCGCCTCAGTTGTAGCGT | |
| | GAGCGGTTTCACGTTCGACGAGTCAGTGATGTCCT | |
| | GGTTGCGCCAGGGTCCCGGCAATGAGTGCGACGCG | |
| | GTCGCTATTATCAGCTCCGATGACAACACCTATTA | |
| | CGACGATAGCGTGAAAGGCCGCTTTACCATCTCCG | |
| | AGGACAACGCCAAAAACATGGTGTATCTGCAAAT | |
| | GAACTCACTGAAGCCGGAAGACACCGCAGTGTACT | |
| | ATTGCGCCGCGCGTCGGCGCAGACCTGTGTACGAT | |
| | TCCGATTATGAACTCCGGCCACGTCCGCTGTGTGG | |
| | CGATTTCGGCGTGTGGGGCCAGGGGACCCAGGTGA | |
| | CGGTCTCCTCC | |
| mIL2Rg_VHH4 | CAGGTGCAGCTCCAGGAATCTGGCGGGGGCTCTGT | 320 |
| | GCAGGCTGGTGGCTCCCTTCGCCTGTCCTGTATTGG | |
| | CTCCGGTCTTCCTTTCGACGAGGATGACATGGGCT | |
| | GGTATCGCCAGGCCCCTGGGAATGAGTGTGAATTG | |
| | GTCAGCTCAATCTCCAGTGACGGCACCGCCTATTA | |
| | CGCCGATTCCGTCAAGGGACGCTTCACTATCTCCA | |
| | GAGACAACGCCAAGAACACTGTGCTGTTGCAGATG | |
| | AACTCCCTGAAGCCCGAGGATACCGCTGTCTATTA | |
| | CTGCGCAGCCGGGGTCCACAGACAGTTCGGCGGTT | |
| | CCAGTTCCTGCGGCGACGCCTTCTACGGCATGGAT | |
| | TACTGGGGCAAGGGAACTCAGGTCACAGTGTCTTC | |
| | C | |
| mIL2Rg_VHH5 | CAGGTTCAGCTTCAGGAGTCCGGCGGGGGCTCCGT | 321 |
| | ACAGGCAGGGGGCTCACTGCGTCTTTCCTGTGTGG | |
| | CGAGTGGCGACGTGTATGGCCGTAACAGCATGGCT | |
| | TGGTTCCGGCAGGCACCTGGAAAGGAACGCGAGG | |
| | GCGTTGCAGTTGGGTATTCCGTAGTGACAACCACT | |
| | TACTATGCCGACAGTGTGAAGGGCCGGTTTACGAT | |
| | CTCAGAGGACAACGATAAAAACACAGTGTACCTG | |
| | GAGATGAACTCCCTGAAGCCGGAAGACACTGCTAT | |
| | GTATTACTGCGCTGCCGATGGCAACCTGTGGCGCG | |
| | GACTCAGGCCCTCCGAGTACACTTATTGGGGTCAG | |
| | GGCACCCAGGTGACCGTTTCAAGT | |
| mIL2Rg_VHH6 | CAGGTCCAGCTTCAGGAGTCAGGTGGCGGTAGTGT | 322 |
| | CCAGGCAGGCGGTAGCCTGCGCCTTAGCTGTGCTA | |
| | CATCCGGCTTCCCTTACTCACGCTATTGTATGGGCT | |
| | GGTTCAGGCAAGCTCCCGGTAAAGAGCGCGAGGG | |
| | AGTGGCAGCCATCGAGCCTGACGGGAGCACATCTT | |
| | ATGCTGACTCTGTAAAGGGGCGTTTCACCATCTCT | |
| | CAGGACAACGCCGTTAATACACTGTACTTGCAAAT | |
| | GAATAACCTGAAGCCCGAGGACACAGCTATGTATT | |
| | ACTGCGCAGCCGACGAGCGTTGCTTCTATTTGAAG | |
| | GACTATGACCTCAGAAGGCCAGCCCAGTACCGCTA | |
| | CTGGGGGCAGGGCACCCAGGTTACCGTGTCATCT | |
| mIL2Rg_VHH7 | CAGGTGCAGTTGCAGGAGAGTGGCGGTGGCCTCGT | 323 |
| | GCAGCCTGGCGGAAGCCTCCGTCTGAGCTGCACTG | |
| | TGTCCGGCTTCACTTTCGACGAGAGCGACATGGGC | |
| | TGGCTGAGGCAGAACCCTGGTAACGAGTGCGGCGT | |
| | TGTGAGTGTCATCACGTCTGATGACAACCCATACT | |
| | ATGATGACAGCGTCAAGGGCCGCTTTACTATCTCC | |
| | GAGGATAACGCCAAGAACATGGTGTACCTCCAGAT | |
| | GAACTCACTGAAGCCCGAGGATACCGGCGTTTATT | |
| | ACTGTGCAACCAGGAGCCGTCAGCCTGTGTACTCA | |
| | CGCGATTACGAGCTGCGGCCCCGCCCCCTCTGTGG | |
| | AGACTTTGGTGTGTGGGGCCAGGGCACCCAGGTGA | |
| | CTGTTTCCAGC | |
| mIL2Rg_VHH8 | CAGGTGCAGTTGCAGGAGAGTGGAGGGGGCTCAG | 324 |
| | TGCAGGCTGGCGGGTCCTTGCGTCTGTCTTGCACC | |
| | GCCTCTGGCTTCACCTTCGATGACTTCGATATGGGT | |
| | TGGTATCGCCAGGCTCCAGGGAACGAGTGCGAATT | |
| | GGTCAGCACTATCAGCGACGATGGCTCAACATATT | |
| | ACGCCGACTCTGTGAAGGGACGGTCTAGCATTAGC | |
| | CGGGACAACGCAAAGAACACCGTCTATCTCCAGAT | |
| | GAACCGCTTGAAGCCTGAGGATACCGGAGTCTATT | |
| | ACTGCGCCGCTGAGGGCGCGTTGGGCTCCAAGACT | |
| | AATTGTGGCTGGGTGGGCAACTTCGGATATTGGGG | |
| | CCAGGGAACACAGGTTACCGTTTCCAGC | |
| mIL2Rg_VHH9 | CAGGTGCAGTTGCAGGAGTCTGGAGGCGGTTCCGT | 325 |
| | TCAGGCCGGGGGCTCTCTGCGCCTGTCCTGCGCTG | |
| | CCTCCGGGTTTACATTTGACGATTTCGATATGGGCT | |
| | GGTATCGCCAGGCCCCTGGCAACGAGTGCGAACTG | |
| | GTGTCTACTATCTCCGATGACGGCTCAACCTACTAT | |
| | GCAGACTCCGTAAAGGGCAGATCCAGCATCTCCCG | |
| | CGACAATGCCAAAAACACTGTGTACCTCCAGATGA | |
| | ACTCCCTCAAGCCTGAGGATACGGCGGTGTACTAT | |
| | TGTGCTGCCGAGGGTGCGCTCGGTAGCAAGACTAA | |
| | TTGCGGCTGGGTGGGCAACTTCGGGTACTGGGGTC | |
| | AGGGGACCCAGGTAACCGTGTCTTCT | |
| mIL2Rg_VHH10 | CAGGTGCAGTTGCAGGAAAGCGGTGGGGGCCTGG | 326 |
| | TGCAGCCCGGAGGCAGCCTGCGCTTGAGCTGCGCT | |
| | GCCTCTGGCTTCACATTCGATGACTTCGATATGGG | |
| | CTGGTATCGTCAAGCACCCGGAAACGAGTGCGAGC | |
| | TGGTGAGTACAATCAGTGATGACGGATCTACCTAC | |
| | TATGCCGACAGCGTCAAGGGAAGATCCAGCATCA | |
| | GTCGCGACAACGCCAAGAGCACCGTTTACCTCCAG | |
| | ATGAACCGCCTCAAGCCTGAGGACACAGGAGTCTA | |
| | TTACTGTGCTGCGGAGGGGGCCTTGGGCAGCAAGA | |
| | CTAACTGTGGATGGGTGGGAAACTTCGGGTATTGG | |
| | GGTCAGGGTACACAGGTCACAGTGTCTTCA | |
| mIL2Rg_VHH11 | CAAGTTCAGCTTCAGGAAAGTGGGGGCGGGCTGGT | 327 |
| | GCAGCCAGGGGGTTCCCTGAAGCTGAGCTGCGCTG | |
| | CCTCTGGGTTTACATTCTCTGATCGCGACATGGGCT | |
| | GGTATCGCCAAGCGCCGGGCAATGAATGCGAAAG | |
| | AGTGAGTACTATTTCTGACGATGGTTCTACTTACTA | |
| | TGCTGACTCCGTGAAGGGCCGTAGCTCCATTTCCA | |
| | GGGACAACGCGAAGAACACCGTATACCTCCAGAT | |
| | GAACTCTCTGAAGCCCGAGGACACCGCTGTGTATT | |
| | ACTGCGCTGCCGAGGGGGCTCTCGGCTCAAAGACC | |
| | AACTGCGGATGGGTCGGTAACTTCGGCTACTGGGG | |
| | CCAGGGCACCCAAGTGACAGTCTCCTCC | |
| mIL2Rg_VHH12 | CAGGTCCAGTTGCAGGAGAGCGGGGGTGGAAGCG | 328 |
| | TCCTCGCCGGAGGGAGCCTCCGTTTGAGCTGCGTC | |
| | GCCTCAGGCTACGGCTACAATTACATCGGATGGTT | |
| | CAGACAGACGCCTGGTAAAGAGCGGGAAGGCGTC | |
| | GCCGTGATTTATATCGGTGGCGGAGACACCTATTA | |
| | CGCTGACTCAGTGAAGGGGCGTTTCACCGCAAGCC | |
| | GGGACAACGCTAAGAGCACCCTGTACCTCCAGATG | |
| | AACTCTCTCGAACCTGAGGACACTGCAATGTATTA | |
| | CTGCGTGGCTCGTTACTGCGTCGGGAGTGTCTACG | |
| | CCTGCCTGAGGGGGGGGCATGATGAGTATGCCCAC | |
| | TGGGGACAAGGAACACAGGTGACTGTCTCCAGT | |
| mIL2Rg_VHH13 | CAGGTTCAGCTCCAGGAGTCTGGTGGCGGTTCCGT | 329 |
| | GCTGGCCGGGGGCTCTCTGCGCCTGTCTTGTGTCG | |
| | CCTCAGGGTACGGCTATAACTACATTGGCTGGTTC | |
| | AGACAGACCCCTGGGAAAGAGCGGGAGGGTGTGG | |
| | CTGTCATTTACACCGGCGGAGGCGACACCTACTAT | |
| | GCCGATTCAGTTAAGGGCAGGTTTACCGCGAGCCG | |
| | TGACAACGCGAAGTCTACTCTGTACCTGCAAATGA | |
| | ACAGCCTGGAACCTGAGGATACTGCGATGTACTAT | |
| | TGTGTGGCCCGGTACTGCGTAGGCTCAGTGTATGC | |
| | CTGCCTGCGCGGGGGTCACGACGAGTACGCACACT | |
| | GGGGACAGGGAACTCAGGTCACCGTGTCTAGC | |
| mIL2Rg_VHH14 | CAGGTGCAACTCCAGGAGTCCGGCGGGGGCTCCGT | 330 |
| | CCAAGCTGGTGGCTCACTGAGGCTTAGCTGTGCTG | |
| | CCTCCGGCTTTACTTTCGACGATTTCGACATGGGTT | |
| | GGTATCGCCAGGCTCCGGGCAATGAGTGCGAGCTG | |
| | GTCTCTACCATTTCCGATGACGGCTCTACCTACTAT | |
| | GCCAACAGTGTTAAGGGTAGGTCTTCCATCTCCCG | |
| | CGACAACGCTAAGAATATGGTGTACTTGCAGATGA | |
| | ACTCTCTGAAGCCTGAGGACACTGCTGTCTACTAT | |
| | TGCGCTGCCGAAGGTGCCCTGGGCTCAAAGACTAA | |
| | TTGCGGCTGGGTCGGTAACTTTGGCTACTGGGGTC | |
| | AGGGGACTCAGGTGACCGTCAGCTCC | |
| mIL2Rg_VHH15 | CAGGTCCAGTTGCAGGAAAGCGGCGGGGGCTCTGT | 331 |
| | TCAGGCAGGCGGAAGCCTTCGTCTGTCCTGTACTG | |
| | CCAGTGGTTTCACCTTTGATGACTTTGACATGGGCT | |
| | GGTATCGGCAAGCCCCCGGAAACGAGTGCGAGCT | |
| | GGTATCCACCATTTCCGATGACGGGTCCACGTACT | |
| | ATGCTGATAGCGTGAAGGGCAGGTCTTCCATCAGC | |
| | CGGGACAACGCCAAGAACACAGTGTATTTGCAGAT | |
| | GAACCGCCTCAAGCCAGAAGACACCGGGGTATATT | |
| | ACTGTGCAGCGGAAGGTGCCCTGGGTAGCAAGAT | |
| | GAACTGCGGATGGGTGGGTAATTTTGGATACTGGG | |
| | GCCAGGGCACGCAGGTTACAGTGTCCAGC | |

TABLE 19
Anti-hIL10Ra/hIL2Rg dual VHH binding to human and cynomolgus IL2Rg-Fc

| | | | | | | | Calc. | |
|---|---|---|---|---|---|---|---|---|
| | | k_{ON} | k_{OFF} | Affinity | Rmax | Load | Rmax | Surface |
| Analyte | Ligand | (1/Ms) | (1/s) | (nM) | (RU) | (RU) | (RU) | Activity |
| A2, | hIL2Rg-Fc | 2.0E+06 | 7.8E−03 | 3.9 | 3.4 | 99 | 74 | 5% |
| DR359 | (SinoBiological | | | | | | | |
| | cat#10555) | | | | | | | |
| | cIL2Rg-Fc | 8.0E+05 | 2.6E−03 | 3.2 | 1.9 | 153 | 115 | 2% |
| | (lot#P210115SV5) | | | | | | | |
| A7, | hIL2Rg-Fc | 1.7E+06 | 6.2E−03 | 3.6 | 3.2 | 99 | 74 | 4% |
| DR392 | (SinoBiological | | | | | | | |
| | cat#10555) | | | | | | | |
| | cIL2Rg-Fc | 1.6E+06 | 4.0E−03 | 2.4 | 1.5 | 161 | 120 | 1% |
| | (lot#P210115SV5) | | | | | | | |
| D6, | hIL2Rg-Fc | 1.9E+05 | 5.1E−03 | 27.5 | 1.9 | 99 | 74 | 3% |
| DR437 | (SinoBiological | | | | | | | |
| | cat#10555) | | | | | | | |
| | cIL2Rg-Fc | 2.9E+05 | 2.2E−03 | 7.8 | 1.3 | 160 | 119 | 1% |
| | (lot#P210115SV5) | | | | | | | |
| D12, | hIL2Rg-Fc | 3.9E+05 | 1.0E−03 | 2.7 | 3.4 | 99 | 74 | 5% |
| DR438 | (SinoBiological | | | | | | | |
| | cat#10555) | | | | | | | |
| | cIL2Rg-Fc | 5.6E+05 | 1.2E−03 | 2.2 | 1.5 | 163 | 122 | 1% |
| | (lot#P210115SV5) | | | | | | | |
| E8, | hIL2Rg-Fc | 3.8E+05 | 2.6E−03 | 6.9 | 3.4 | 99 | 74 | 5% |
| DR444 | (SinoBiological | | | | | | | |
| | cat#10555) | | | | | | | |
| | cIL2Rg-Fc | 1.5E+05 | 7.7E−04 | 5.3 | 1.8 | 161 | 120 | 2% |
| | (lot#P210115SV5) | | | | | | | |
| F1, | hIL2Rg-Fc | 4.7E+05 | 5.3E−03 | 11.1 | 3.1 | 99 | 74 | 4% |
| DR441 | (SinoBiological | | | | | | | |
| | cat#10555) | | | | | | | |
| | cIL2Rg-Fc | 3.4E+05 | 2.8E−03 | 8.3 | 1.6 | 162 | 121 | 1% |
| | (lot#P210115SV5) | | | | | | | |
| F3, | hIL2Rg-Fc | 2.2E+05 | 6.5E−03 | 30.4 | 1.5 | 98 | 73 | 2% |
| DR449 | (SinoBiological | | | | | | | |
| | cat#10555) | | | | | | | |
| | cIL2Rg-Fc | 2.1E+05 | 4.8E−03 | 22.6 | 0.9 | 163 | 122 | 1% |
| | (lot#P210115SV5) | | | | | | | |
| F7, | hIL2Rg-Fc | 2.0E+06 | 4.2E−02 | 21.5 | 3.5 | 98 | 73 | 5% |
| DR442 | (SinoBiological | | | | | | | |
| | cat#10555) | | | | | | | |
| | cIL2Rg-Fc | 7.9E+04 | 3.3E−03 | 41.3 | 7.9 | 162 | 121 | 7% |
| | (lot#P210115SV5) | | | | | | | |
| G3, | hIL2Rg-Fc | 3.4E+05 | 5.7E−03 | 16.6 | 3.6 | 98 | 73 | 5% |
| DR471 | (SinoBiological | | | | | | | |
| | cat#10555) | | | | | | | |
| | cIL2Rg-Fc | 3.6E+05 | 4.8E−03 | 13.4 | 1.6 | 164 | 122 | 1% |
| | (lot#P210115SV5) | | | | | | | |
| G8, | hIL2Rg-Fc | 1.7E+05 | 1.5E−03 | 8.5 | 4.2 | 98 | 73 | 6% |
| DR468 | (SinoBiological | | | | | | | |
| | cat#10555) | | | | | | | |
| | cIL2Rg-Fc | 2.4E+05 | 1.0E−03 | 4.3 | 1.8 | 164 | 122 | 1% |
| | (lot#P210115SV5) | | | | | | | |
| H1, | hIL2Rg-Fc | 2.5E+05 | 3.7E−03 | 14.5 | 2.6 | 98 | 73 | 4% |
| DR465 | (SinoBiological | | | | | | | |
| | cat#10555) | | | | | | | |
| | cIL2Rg-Fc | 7.0E+05 | 2.2E−03 | 3.2 | 0.9 | 163 | 122 | 1% |
| | (lot#P210115SV5) | | | | | | | |
| H7, | hIL2Rg-Fc | 1.2E+06* | 2.6E−02 | 20.8 | 4.2 | 97 | 73 | 6% |
| DR466 | (SinoBiological | | | | | | | |
| | cat#10555) | | | | | | | |
| | cIL2Rg-Fc | 7.5E+04* | 3.7E−03 | 49.9 | 11.5 | 164 | 122 | 9% |
| | (lot#P210115SV5) | | | | | | | |
| H9, | hIL2Rg-Fc | 3.1E+05 | 9.9E−04 | 3.2 | 4.1 | 97 | 73 | 6% |
| DR474 | (SinoBiological | | | | | | | |
| | cat#10555) | | | | | | | |
| | cIL2Rg-Fc | 3.3E+05 | 9.3E−04 | 2.9 | 2.3 | 163 | 121 | 2% |
| | (lot#P210115SV5) | | | | | | | |

TABLE 20
Effect of Linker Length IL10Ra/IL10Rg VHH dimers on pSTAT3 Induction of on CD8 T cell

| | | | Concentration of | |
|---|---|---|---|---|
| VHH1-VHH2 ID | Linker | Tag | molecule (μM) | pSTAT3 (MFI) |
| hIL10Ra_VHH14- | GGGS | Fc | 0 | 6751 |
| hIL2Rg_VHH19 | | | | |
| hIL10Ra_VHH14- | GGGS | Fc | 0.0001 | 7538 |
| hIL2Rg_VHH19 | | | | |
| hIL10Ra_VHH14- | GGGS | Fc | 0.001 | 7889 |
| hIL2Rg_VHH19 | | | | |
| hIL10Ra_VHH14- | GGGS | Fc | 0.01 | 7802 |
| hIL2Rg_VHH19 | | | | |
| hIL10Ra_VHH14- | GGGS | Fc | 0.1 | 7330 |
| hIL2Rg_VHH19 | | | | |
| hIL10Ra_VHH14- | GGGS | Fc | 1 | 9316 |
| hIL2Rg_VHH19 | | | | |
| hIL10Ra_VHH14- | GGGS | Fc | 10 | 12256 |
| hIL2Rg_VHH19 | | | | |
| hIL10Ra_VHH14- | GGGS | Fc | 100 | 13188 |
| hIL2Rg_VHH19 | | | | |
| hIL10Ra_VHH14- | GGGS | his | 0 | 6751 |
| hIL2Rg_VHH19 | | | | |
| hIL10Ra_VHH14- | GGGS | his | 0.0001 | 7207 |
| hIL2Rg_VHH19 | | | | |
| hIL10Ra_VHH14- | GGGS | his | 0.001 | 7461 |
| hIL2Rg_VHH19 | | | | |
| hIL10Ra_VHH14- | GGGS | his | 0.01 | 7195 |
| hIL2Rg_VHH19 | | | | |
| hIL10Ra_VHH14- | GGGS | his | 0.1 | 6584 |
| hIL2Rg_VHH19 | | | | |
| hIL10Ra_VHH14- | GGGS | his | 1 | 6495 |
| hIL2Rg_VHH19 | | | | |
| hIL10Ra_VHH14- | GGGS | his | 10 | 7934 |
| hIL2Rg_VHH19 | | | | |
| hIL10Ra_VHH14- | GGGS | his | 100 | 9967 |
| hIL2Rg_VHH19 | | | | |
| hIL10Ra_VHH14- | No linker | his | 0 | 6751 |
| hIL2Rg_VHH19 | | | | |
| hIL10Ra_VHH14- | No linker | his | 0.0001 | 7383 |
| hIL2Rg_VHH19 | | | | |
| hIL10Ra_VHH14- | No linker | his | 0.001 | 7742 |
| hIL2Rg_VHH19 | | | | |
| hIL10Ra_VHH14- | No linker | his | 0.01 | 7799 |
| hIL2Rg_VHH19 | | | | |
| hIL10Ra_VHH14- | No linke | his | 0.1 | 6775 |
| hIL2Rg_VHH19 | | | | |
| hIL10Ra_VHH14- | No linker | his | 1 | 7725 |
| hIL2Rg_VHH19 | | | | |
| hIL10Ra_VHH14- | No linker | his | 10 | 7486 |
| hIL2Rg_VHH19 | | | | |
| hIL10Ra_VHH14- | No linker | his | 100 | 6202 |
| hIL2Rg_VHH19 | | | | |
| hIL10Ra_VHH14- | GS | his | 0 | 6751 |
| hIL2Rg_VHH19 | | | | |
| hIL10Ra_VHH14- | GS | his | 0.0001 | 7402 |
| hIL2Rg_VHH19 | | | | |
| hIL10Ra_VHH14- | GS | his | 0.001 | 8109 |
| hIL2Rg_VHH19 | | | | |
| hIL10Ra_VHH14- | GS | his | 0.01 | 8114 |
| hIL2Rg_VHH19 | | | | |
| hIL10Ra_VHH14- | GS | his | 0.1 | 7101 |
| hIL2Rg_VHH19 | | | | |
| hIL10Ra_VHH14- | GS | his | 1 | 8204 |
| hIL2Rg_VHH19 | | | | |
| hIL10Ra_VHH14- | GS | his | 10 | 8411 |
| hIL2Rg_VHH19 | | | | |
| hIL10Ra_VHH14- | GS | his | 100 | 7905 |
| hIL2Rg_VHH19 | | | | |
| hIL10Ra_VHH14- | GGSGGS | his | 0 | 6751 |
| hIL2Rg_VHH19 | | | | |
| hIL10Ra_VHH14- | GGSGGS | his | 0.0001 | 7955 |
| hIL2Rg_VHH19 | | | | |
| hIL10Ra_VHH14- | GGSGGS | his | 0.001 | 8498 |
| hIL2Rg_VHH19 | | | | |
| hIL10Ra_VHH14- | GGSGGS | his | 0.01 | 7658 |
| hIL2Rg_VHH19 | | | | |
| hIL10Ra_VHH14- | GGSGGS | his | 0.1 | 8156 |
| hIL2Rg_VHH19 | | | | |
| hIL10Ra_VHH14- | GGSGGS | his | 1 | 7715 |
| hIL2Rg_VHH19 | | | | |
| hIL10Ra_VHH14- | GGSGGS | his | 10 | 8296 |
| hIL2Rg_VHH19 | | | | |
| hIL10Ra_VHH14- | GGSGGS | his | 100 | 7001 |
| hIL2Rg_VHH19 | | | | |
| hIL10Ra_VHH14- | GGGSGGGS | his | 0 | 6751 |
| hIL2Rg_VHH19 | | | | |
| hIL10Ra_VHH14- | GGGSGGGS | his | 0.0001 | 7059 |
| hIL2Rg_VHH19 | | | | |
| hIL10Ra_VHH14- | GGGSGGGS | his | 0.001 | 7522 |
| hIL2Rg_VHH19 | | | | |
| hIL10Ra_VHH14- | GGGSGGGS | his | 0.01 | 6331 |
| hIL2Rg_VHH19 | | | | |
| hIL10Ra_VHH14- | GGGSGGGS | his | 0.1 | 7073 |
| hIL2Rg_VHH19 | | | | |
| hIL10Ra_VHH14- | GGGSGGGS | his | 1 | 7872 |
| hIL2Rg_VHH19 | | | | |
| hIL10Ra_VHH14- | GGGSGGGS | his | 10 | 8431 |
| hIL2Rg_VHH19 | | | | |
| hIL10Ra_VHH14- | GGGSGGGS | his | 100 | 7974 |
| hIL2Rg_VHH19 | | | | |
| hIL10Ra_VHH14- | GGSGGSGGSG | his | 0 | 6751 |
| hIL2Rg_VHH19 | | | | |
| hIL10Ra_VHH14- | GGSGGSGGSG | his | 0.0001 | 7840 |
| hIL2Rg_VHH19 | | | | |
| hIL10Ra_VHH14- | GGSGGSGGSG | his | 0.001 | 7516 |
| hIL2Rg_VHH19 | | | | |
| hIL10Ra_VHH14- | GGSGGSGGSG | his | 0.01 | 6922 |
| hIL2Rg_VHH19 | | | | |
| hIL10Ra_VHH14- | GGSGGSGGSG | his | 0.1 | 6782 |
| hIL2Rg_VHH19 | | | | |
| hIL10Ra_VHH14- | GGSGGSGGSG | his | 1 | 6479 |
| hIL2Rg_VHH19 | | | | |
| hIL10Ra_VHH14- | GGSGGSGGSG | his | 10 | 7329 |
| hIL2Rg_VHH19 | | | | |
| hIL10Ra_VHH14- | GGSGGSGGSG | his | 100 | 6928 |
| hIL2Rg_VHH19 | | | | |

TABLE 21
Effect of Linker Length IL10Ra/IL10Rg VHH dimers on pSTAT3 Induction of on CD4 T cells

| | | | Concentration of | |
|---|---|---|---|---|
| VHH1-VHH2 ID | Linker | Tag | molecule (μ M) | pSTAT3 (MFI) |
| hIL10Ra_VHH14- | GGGS | Fc | 0 | 10291 |
| hIL2Rg_VHH19 | | | | |
| hIL10Ra_VHH14- | GGGS | Fc | 0.0001 | 12636 |
| hIL2Rg_VHH19 | | | | |
| hIL10Ra_VHH14- | GGGS | Fc | 0.001 | 12627 |
| hIL2Rg_VHH19 | | | | |
| hIL10Ra_VHH14- | GGGS | Fc | 0.01 | 12526 |
| hIL2Rg_VHH19 | | | | |
| hIL10Ra_VHH14- | GGGS | Fc | 0.1 | 11340 |
| hIL2Rg_VHH19 | | | | |
| hIL10Ra_VHH14- | GGGS | Fc | 1 | 13578 |
| hIL2Rg_VHH19 | | | | |
| hIL10Ra_VHH14- | GGGS | Fc | 10 | 14841 |
| hIL2Rg_VHH19 | | | | |
| hIL10Ra_VHH14- | GGGS | Fc | 100 | 16045 |
| hIL2Rg_VHH19 | | | | |
| hIL10Ra_VHH14- | GGGS | his | 0 | 10291 |
| hIL2Rg_VHH19 | | | | |
| hIL10Ra_VHH14- | GGGS | his | 0.0001 | 11924 |
| hIL2Rg_VHH19 | | | | |
| hIL10Ra_VHH14- | GGGS | his | 0.001 | 12086 |
| hIL2Rg_VHH19 | | | | |
| hIL10Ra_VHH14- | GGGS | his | 0.01 | 11654 |
| hIL2Rg_VHH19 | | | | |
| hIL10Ra_VHH14- | GGGS | his | 0.1 | 9670 |
| hIL2Rg_VHH19 | | | | |
| hIL10Ra_VHH14- | GGGS | his | 1 | 9591 |
| hIL2Rg_VHH19 | | | | |
| hIL10Ra_VHH14- | GGGS | his | 10 | 11382 |
| hIL2Rg_VHH19 | | | | |
| hIL10Ra_VHH14- | GGGS | his | 100 | 14725 |
| hIL2Rg_VHH19 | | | | |
| hIL10Ra_VHH14- | No linker | his | 0 | 10291 |
| hIL2Rg_VHH19 | | | | |
| hIL10Ra_VHH14- | No linker | his | 0.0001 | 12174 |
| hIL2Rg_VHH19 | | | | |
| hIL10Ra_VHH14- | No linker | his | 0.001 | 12882 |
| hIL2Rg_VHH19 | | | | |
| hIL10Ra_VHH14- | No linker | his | 0.01 | 12460 |
| hIL2Rg_VHH19 | | | | |
| hIL10Ra_VHH14- | No linker | his | 0.1 | 11004 |
| hIL2Rg_VHH19 | | | | |
| hIL10Ra_VHH14- | No linker | his | 1 | 12144 |
| hIL2Rg_VHH19 | | | | |
| hIL10Ra_VHH14- | No linker | his | 10 | 11846 |
| hIL2Rg_VHH19 | | | | |
| hIL10Ra_VHH14- | No linker | his | 100 | 9036 |
| hIL2Rg_VHH19 | | | | |
| hIL10Ra_VHH14- | GS | his | 0 | 10291 |
| hIL2Rg_VHH19 | | | | |
| hIL10Ra_VHH14- | GS | his | 0.0001 | 11707 |
| hIL2Rg_VHH19 | | | | |
| hIL10Ra_VHH14- | GS | his | 0.001 | 12776 |
| hIL2Rg_VHH19 | | | | |
| hIL10Ra_VHH14- | GS | his | 0.01 | 13621 |
| hIL2Rg_VHH19 | | | | |
| hIL10Ra_VHH14- | GS | his | 0.1 | 10942 |
| hIL2Rg_VHH19 | | | | |
| hIL10Ra_VHH14- | GS | his | 1 | 12949 |
| hIL2Rg_VHH19 | | | | |
| hIL10Ra_VHH14- | GS | his | 10 | 12563 |
| hIL2Rg_VHH19 | | | | |
| hIL10Ra_VHH14- | GS | his | 100 | 11613 |
| hIL2Rg_VHH19 | | | | |
| hIL10Ra_VHH14- | GGSGGS | his | 0 | 10291 |
| hIL2Rg_VHH19 | | | | |
| hIL10Ra_VHH14- | GGSGGS | his | 0.0001 | 13197 |
| hIL2Rg_VHH19 | | | | |
| hIL10Ra_VHH14- | GGSGGS | his | 0.001 | 13876 |
| hIL2Rg_VHH19 | | | | |
| hIL10Ra_VHH14- | GGSGGS | his | 0.01 | 12787 |
| hIL2Rg_VHH19 | | | | |
| hIL10Ra_VHH14- | GGSGGS | his | 0.1 | 13577 |
| hIL2Rg_VHH19 | | | | |
| hIL10Ra_VHH14- | GGSGGS | his | 1 | 12991 |
| hIL2Rg_VHH19 | | | | |
| hIL10Ra_VHH14- | GGSGGS | his | 10 | 11840 |
| hIL2Rg_VHH19 | | | | |
| hIL10Ra_VHH14- | GGSGGS | his | 100 | 10166 |
| hIL2Rg_VHH19 | | | | |
| hIL10Ra_VHH14- | GGGSGGGS | his | 0 | 10291 |
| hIL2Rg_VHH19 | | | | |
| hIL10Ra_VHH14- | GGGSGGGS | his | 0.0001 | 10704 |
| hIL2Rg_VHH19 | | | | |
| hIL10Ra_VHH14- | GGGSGGGS | his | 0.0013 | 12050 |
| hIL2Rg_VHH19 | | | | |
| hIL10Ra_VHH14- | GGGSGGGS | his | 0.01 | 9547 |
| hIL2Rg_VHH19 | | | | |
| hIL10Ra_VHH14- | GGGSGGGS | his | 0.1 | 11269 |
| hIL2Rg_VHH19 | | | | |
| hIL10Ra_VHH14- | GGGSGGGS | his | 1 | 12658 |
| hIL2Rg_VHH19 | | | | |
| hIL10Ra_VHH14- | GGGSGGGS | his | 10 | 13170 |
| hIL2Rg_VHH19 | | | | |
| hIL10Ra_VHH14- | GGGSGGGS | his | 100 | 11553 |
| hIL2Rg_VHH19 | | | | |
| hIL10Ra_VHH14- | GGSGGSGGSG | his | 0 | 10291 |
| hIL2Rg_VHH19 | | | | |
| hIL10Ra_VHH14- | GGSGGSGGSG | his | 0.0001 | 12805 |
| hIL2Rg_VHH19 | | | | |
| hIL10Ra_VHH14- | GGSGGSGGSG | his | 0.001 | 11826 |
| hIL2Rg_VHH19 | | | | |
| hIL10Ra_VHH14- | GGSGGSGGSG | his | 0.01 | 11130 |
| hIL2Rg_VHH19 | | | | |
| hIL10Ra_VHH14- | GGSGGSGGSG | his | 0.1 | 10217 |
| hIL2Rg_VHH19 | | | | |
| hIL10Ra_VHH14- | GGSGGSGGSG | his | 1 | 9972 |
| hIL2Rg_VHH19 | | | | |
| hIL10Ra_VHH14- | GGSGGSGGSG | his | 10 | 11400 |
| hIL2Rg_VHH19 | | | | |
| hIL10Ra_VHH14- | GGSGGSGGSG | his | 100 | 10324 |
| hIL2Rg_VHH19 | | | | |

TABLE 22
Effect of Linker Length IL10Ra/IL10Rg VHH dimers on pSTAT3 Induction of in monocytes

| | | | Concentration of | |
|---|---|---|---|---|
| VHH1-VHH2 ID | Linker | Tag | molecule (μM) | pSTAT3 (MFI) |
| hIL10Ra_VHH14- | GGGS | Fc | 0 | 4610 |
| hIL2Rg_VHH19 | | | | |
| hIL10Ra_VHH14- | GGGS | Fc | 0.0001 | 4373 |
| hIL2Rg_VHH19 | | | | |
| hIL10Ra_VHH14- | GGGS | Fc | 0.001 | 4737 |
| hIL2Rg_VHH19 | | | | |
| hIL10Ra_VHH14- | GGGS | Fc | 0.01 | 4417 |
| hIL2Rg_VHH19 | | | | |
| hIL10Ra_VHH14- | GGGS | Fc | 0.1 | 4808 |
| hIL2Rg_VHH19 | | | | |
| hIL10Ra_VHH14- | GGGS | Fc | 1 | 5687 |
| hIL2Rg_VHH19 | | | | |
| hIL10Ra_VHH14- | GGGS | Fc | 10 | 6688 |
| hIL2Rg_VHH19 | | | | |
| hIL10Ra_VHH14- | GGGS | Fc | 100 | 6026 |
| hIL2Rg_VHH19 | | | | |
| hIL10Ra_VHH14- | GGGS | his | 0 | 4610 |
| hIL2Rg_VHH19 | | | | |
| hIL10Ra_VHH14- | GGGS | his | 0.0001 | 4151 |
| hIL2Rg_VHH19 | | | | |
| hIL10Ra_VHH14- | GGGS | his | 0.001 | 4510 |
| hIL2Rg_VHH19 | | | | |
| hIL10Ra_VHH14- | GGGS | his | 0.01 | 4357 |
| hIL2Rg_VHH19 | | | | |
| hIL10Ra_VHH14- | GGGS | his | 0.1 | 4277 |
| hIL2Rg_VHH19 | | | | |
| hIL10Ra_VHH14- | GGGS | his | 1 | 4640 |
| hIL2Rg_VHH19 | | | | |
| hIL10Ra_VHH14- | GGGS | his | 10 | 4842 |
| hIL2Rg_VHH19 | | | | |
| hIL10Ra_VHH14- | GGGS | his | 100 | 4877 |
| hIL2Rg_VHH19 | | | | |
| hIL10Ra_VHH14- | No linker | his | 0 | 4610 |
| hIL2Rg_VHH19 | | | | |
| hIL10Ra_VHH14- | No linker | his | 0.0001 | 3969 |
| hIL2Rg_VHH19 | | | | |
| hIL10Ra_VHH14- | No linker | his | 0.001 | 4602 |
| hIL2Rg_VHH19 | | | | |
| hIL10Ra_VHH14- | No linker | his | 0.01 | 4425 |
| hIL2Rg_VHH19 | | | | |
| hIL10Ra_VHH14- | No linker | his | 0.1 | 4423 |
| hIL2Rg_VHH19 | | | | |
| hIL10Ra_VHH14- | No linker | his | 1 | 4480 |
| hIL2Rg_VHH19 | | | | |
| hIL10Ra_VHH14- | No linker | his | 10 | 4331 |
| hIL2Rg_VHH19 | | | | |
| hIL10Ra_VHH14- | No linker | his | 100 | 4139 |
| hIL2Rg_VHH19 | | | | |
| hIL10Ra_VHH14- | GS | his | 0 | 4610 |
| hIL2Rg_VHH19 | | | | |
| hIL10Ra_VHH14- | GS | his | 0.0001 | 4035 |
| hIL2Rg_VHH19 | | | | |
| hIL10Ra_VHH14- | GS | his | 0.001 | 4821 |
| hIL2Rg_VHH19 | | | | |
| hIL10Ra_VHH14- | GS | his | 0.01 | 4012 |
| hIL2Rg_VHH19 | | | | |
| hIL10Ra_VHH14- | GS | his | 0.1 | 4432 |
| hIL2Rg_VHH19 | | | | |
| hIL10Ra_VHH14- | GS | his | 1 | 4791 |
| hIL2Rg_VHH19 | | | | |
| hIL10Ra_VHH14- | GS | his | 10 | 4934 |
| hIL2Rg_VHH19 | | | | |
| hIL10Ra_VHH14- | GS | his | 100 | 4930 |
| hIL2Rg_VHH19 | | | | |
| hIL10Ra_VHH14- | GGSGGS | his | 0 | 4610 |
| hIL2Rg_VHH19 | | | | |
| hIL10Ra_VHH14- | GGSGGS | his | 0.0001 | 4217 |
| hIL2Rg_VHH19 | | | | |
| hIL10Ra_VHH14- | GGSGGS | his | 0.001 | 4677 |
| hIL2Rg_VHH19 | | | | |
| hIL10Ra_VHH14- | GGSGGS | his | 0.01 | 4563 |
| hIL2Rg_VHH19 | | | | |
| hIL10Ra_VHH14- | GGSGGS | his | 0.1 | 4468 |
| hIL2Rg_VHH19 | | | | |
| hIL10Ra_VHH14- | GGSGGS | his | 1 | 4752 |
| hIL2Rg_VHH19 | | | | |
| hIL10Ra_VHH14- | GGSGGS | his | 10 | 4894 |
| hIL2Rg_VHH19 | | | | |
| hIL10Ra_VHH14- | GGSGGS | his | 100 | 4726 |
| hIL2Rg_VHH19 | | | | |
| hIL10Ra_VHH14- | GGGSGGGS | his | 0 | 4610 |
| hIL2Rg_VHH19 | | | | |
| hIL10Ra_VHH14- | GGGSGGGS | his | 0.0001 | 4666 |
| hIL2Rg_VHH19 | | | | |
| hIL10Ra_VHH14- | GGGSGGGS | his | 0.001 | 4821 |
| hIL2Rg_VHH19 | | | | |
| hIL10Ra_VHH14- | GGGSGGGS | his | 0.01 | 4356 |
| hIL2Rg_VHH19 | | | | |
| hIL10Ra_VHH14- | GGGSGGGS | his | 0.1 | 4425 |
| hIL2Rg_VHH19 | | | | |
| hIL10Ra_VHH14- | GGGSGGGS | his | 1 | 4760 |
| hIL2Rg_VHH19 | | | | |
| hIL10Ra_VHH14- | GGGSGGGS | his | 10 | 4879 |
| hIL2Rg_VHH19 | | | | |
| hIL10Ra_VHH14- | GGGSGGGS | his | 100 | 4617 |
| hIL2Rg_VHH19 | | | | |
| hIL10Ra_VHH14- | GGSGGSGGSG | his | 0 | 4610 |
| hIL2Rg_VHH19 | | | | |
| hIL10Ra_VHH14- | GGSGGSGGSG | his | 0.0001 | 4232 |
| hIL2Rg_VHH19 | | | | |
| hIL10Ra_VHH14- | GGSGGSGGSG | his | 0.001 | 4709 |
| hIL2Rg_VHH19 | | | | |
| hIL10Ra_VHH14- | GGSGGSGGSG | his | 0.01 | 4701 |
| hIL2Rg_VHH19 | | | | |
| hIL10Ra_VHH14- | GGSGGSGGSG | his | 0.1 | 4694 |
| hIL2Rg_VHH19 | | | | |
| hIL10Ra_VHH14- | GGSGGSGGSG | his | 1 | 4622 |
| hIL2Rg_VHH19 | | | | |
| hIL10Ra_VHH14- | GGSGGSGGSG | his | 10 | 4546 |
| hIL2Rg_VHH19 | | | | |
| hIL10Ra_VHH14- | GGSGGSGGSG | his | 100 | 4862 |
| hIL2Rg_VHH19 | | | | |

TABLE 23
Activity of VHH dimers on
CD8 T cell IFNγ secretion.

| | | | Concen- | |
|---|---|---|---|---|
| | | | tration | |
| | | | of | |
| | | | molecule | IFNγ |
| VHH1 - VHH2 ID | Linker | Tag | (μM) | (pg/mL) |
| hIL10Ra_VHH14 - | GGGS | Fc | 0 | 122093 |
| hIL2Rg_VHH19 | | | | |
| hIL10Ra_VHH14 - | GGGS | Fc | 0.0001 | 103635 |
| hIL2Rg_VHH19 | | | | |
| hIL10Ra_VHH14 - | GGGS | Fc | 0.001 | 112903 |
| hIL2Rg_VHH19 | | | | |
| hIL10Ra_VHH14 - | GGGS | Fc | 0.01 | 131153 |
| hIL2Rg_VHH19 | | | | |
| hIL10Ra_VHH14 - | GGGS | Fc | 0.1 | 144485 |
| hIL2Rg_VHH19 | | | | |
| hIL10Ra_VHH14 - | GGGS | Fc | 1 | 165539 |
| hIL2Rg_VHH19 | | | | |
| hIL10Ra_VHH14 - | GGGS | Fc | 10 | 156982 |
| hIL2Rg_VHH19 | | | | |
| hIL10Ra_VHH14 - | GGGS | Fc | 100 | 147964 |
| hIL2Rg_VHH19 | | | | |
| hIL10Ra_VHH14 - | GGGS | his | 0 | 122093 |
| hIL2Rg_VHH19 | | | | |
| hIL10Ra_VHH14 - | GGGS | his | 0.0001 | 96799 |
| hIL2Rg_VHH19 | | | | |
| hIL10Ra_VHH14 - | GGGS | his | 0.001 | 99579 |
| hIL2Rg_VHH19 | | | | |
| hIL10Ra_VHH14 - | GGGS | his | 0.01 | 106757 |
| hIL2Rg_VHH19 | | | | |
| hIL10Ra_VHH14 - | GGGS | his | 0.1 | 114181 |
| hIL2Rg_VHH19 | | | | |
| hIL10Ra_VHH14 - | GGGS | his | 1 | 130484 |
| hIL2Rg_VHH19 | | | | |
| hIL10Ra_VHH14 - | GGGS | his | 10 | 133684 |
| hIL2Rg_VHH19 | | | | |
| hIL10Ra_VHH14 - | GGGS | his | 100 | 134443 |
| hIL2Rg_VHH19 | | | | |
| hIL10Ra_VHH14 - | No linker | his | 0 | 122093 |
| hIL2Rg_VHH19 | | | | |
| hIL10Ra_VHH14 - | No linker | his | 0.0001 | 101945 |
| hIL2Rg_VHH19 | | | | |
| hIL10Ra_VHH14 - | No linker | his | 0.001 | 103568 |
| hIL2Rg_VHH19 | | | | |
| hIL10Ra_VHH14 - | No linker | his | 0.01 | 111251 |
| hIL2Rg_VHH19 | | | | |
| hIL10Ra_VHH14 - | No linker | his | 0.1 | 111247 |
| hIL2Rg_VHH19 | | | | |
| hIL10Ra_VHH14 - | No linker | his | 1 | 122585 |
| hIL2Rg_VHH19 | | | | |
| hIL10Ra_VHH14 - | No linker | his | 10 | 130574 |
| hIL2Rg_VHH19 | | | | |
| hIL10Ra_VHH14 - | No linker | his | 100 | 133923 |
| hIL2Rg_VHH19 | | | | |
| hIL10Ra_VHH14 - | GS | his | 0 | 122093 |
| hIL2Rg_VHH19 | | | | |
| hIL10Ra_VHH14 - | GS | his | 0.0001 | 91703 |
| hIL2Rg_VHH19 | | | | |
| hIL10Ra_VHH14 - | GS | his | 0.001 | 105021 |
| hIL2Rg_VHH19 | | | | |
| hIL10Ra_VHH14 - | GS | his | 0.01 | 122227 |
| hIL2Rg_VHH19 | | | | |
| hIL10Ra_VHH14 - | GS | his | 0.1 | 128960 |
| hIL2Rg_VHH19 | | | | |
| hIL10Ra_VHH14 - | GS | his | 1 | 133736 |
| hIL2Rg_VHH19 | | | | |
| hIL10Ra_VHH14 - | GS | his | 10 | 142927 |
| hIL2Rg_VHH19 | | | | |
| hIL10Ra_VHH14 - | GS | his | 100 | 143369 |
| hIL2Rg_VHH19 | | | | |
| hIL10Ra_VHH14 - | GGSGGS | his | 0 | 122093 |
| hIL2Rg_VHH19 | | | | |
| hIL10Ra_VHH14 - | GGSGGS | his | 0.0001 | 94677 |
| hIL2Rg_VHH19 | | | | |
| hIL10Ra_VHH14 - | GGSGGS | his | 0.001 | 109945 |
| hIL2Rg_VHH19 | | | | |
| hIL10Ra_VHH14 - | GGSGGS | his | 0.01 | 116978 |
| hIL2Rg_VHH19 | | | | |
| hIL10Ra_VHH14 - | GGSGGS | his | 0.1 | 121735 |
| hIL2Rg_VHH19 | | | | |
| hIL10Ra_VHH14 - | GGSGGS | his | 1 | 143818 |
| hIL2Rg_VHH19 | | | | |
| hIL10Ra_VHH14 - | GGSGGS | his | 10 | 149494 |
| hIL2Rg_VHH19 | | | | |
| hIL10Ra_VHH14 - | GGSGGS | his | 100 | 126891 |
| hIL2Rg_VHH19 | | | | |
| hIL10Ra_VHH14 - | GGGSGGGS | his | 0 | 122093 |
| hIL2Rg_VHH19 | | | | |
| hIL10Ra_VHH14 - | GGGSGGGS | his | 0.0001 | 95530 |
| hIL2Rg_VHH19 | | | | |
| hIL10Ra_VHH14 - | GGGSGGGS | his | 0.001 | 107757 |
| hIL2Rg_VHH19 | | | | |
| hIL10Ra_VHH14 - | GGGSGGGS | his | 0.01 | 101956 |
| hIL2Rg_VHH19 | | | | |
| hIL10Ra_VHH14 - | GGGSGGGS | his | 0.1 | 121526 |
| hIL2Rg_VHH19 | | | | |
| hIL10Ra_VHH14 - | GGGSGGGS | his | 1 | 141710 |
| hIL2Rg_VHH19 | | | | |
| hIL10Ra_VHH14 - | GGGSGGGS | his | 10 | 143032 |
| hIL2Rg_VHH19 | | | | |
| hIL10Ra_VHH14 - | GGGSGGGS | his | 100 | 119598 |
| hIL2Rg_VHH19 | | | | |
| hIL10Ra_VHH14 - | GGSGGSGGSG | his | 0 | 122093 |
| hIL2Rg_VHH19 | | | | |
| hIL10Ra_VHH14 - | GGSGGSGGSG | his | 0.0001 | 90061 |
| hIL2Rg_VHH19 | | | | |
| hIL10Ra_VHH14 - | GGSGGSGGSG | his | 0.001 | 125238 |
| hIL2Rg_VHH19 | | | | |
| hIL10Ra_VHH14 - | GGSGGSGGSG | his | 0.01 | 126735 |
| hIL2Rg_VHH19 | | | | |
| hIL10Ra_VHH14 - | GGSGGSGGSG | his | 0.1 | 129834 |
| hIL2Rg_VHH19 | | | | |
| hIL10Ra_VHH14 - | GGSGGSGGSG | his | 1 | 147457 |
| hIL2Rg_VHH19 | | | | |
| hIL10Ra_VHH14 - | GGSGGSGGSG | his | 10 | 154053 |
| hIL2Rg_VHH19 | | | | |
| hIL10Ra_VHH14 - | GGSGGSGGSG | his | 100 | 140732 |
| hIL2Rg_VHH19 | | | | |

TABLE 24
Activity of VHH dimers on CD8 T
cell Granzyme A secretion.

| | | | Concen- | |
|---|---|---|---|---|
| | | | tration | |
| | | | of | Gran- |
| | | | molecule | zyme A |
| VHH1 - VHH2 ID | Linker | Tag | (μM) | (pg/mL) |
| hIL10Ra_VHH14 - | GGGS | Fc | 0 | 25242 |
| hIL2Rg_VHH19 | | | | |
| hIL10Ra_VHH14 - | GGGS | Fc | 0.0001 | 22096 |
| hIL2Rg_VHH19 | | | | |
| hIL10Ra_VHH14 - | GGGS | Fc | 0.001 | 25929 |
| hIL2Rg_VHH19 | | | | |
| hIL10Ra_VHH14 - | GGGS | Fc | 0.01 | 27649 |
| hIL2Rg_VHH19 | | | | |
| hIL10Ra_VHH14 - | GGGS | Fc | 0.1 | 29961 |
| hIL2Rg_VHH19 | | | | |
| hIL10Ra_VHH14 - | GGGS | Fc | 1 | 29754 |
| hIL2Rg_VHH19 | | | | |
| hIL10Ra_VHH14 - | GGGS | Fc | 10 | 28484 |
| hIL2Rg_VHH19 | | | | |
| hIL10Ra_VHH14 - | GGGS | Fc | 100 | 25731 |
| hIL2Rg_VHH19 | | | | |
| hIL10Ra_VHH14 - | GGGS | his | 0 | 25242 |
| hIL2Rg_VHH19 | | | | |
| hIL10Ra_VHH14 - | GGGS | his | 0.0001 | 19701 |
| hIL2Rg_VHH19 | | | | |
| hIL10Ra_VHH14 - | GGGS | his | 0.001 | 20912 |
| hIL2Rg_VHH19 | | | | |
| hIL10Ra_VHH14 - | GGGS | his | 0.01 | 22320 |
| hIL2Rg_VHH19 | | | | |
| hIL10Ra_VHH14 - | GGGS | his | 0.1 | 23735 |
| hIL2Rg_VHH19 | | | | |
| hIL10Ra_VHH14 - | GGGS | his | 1 | 26393 |
| hIL2Rg_VHH19 | | | | |
| hIL10Ra_VHH14 - | GGGS | his | 10 | 26515 |
| hIL2Rg_VHH19 | | | | |
| hIL10Ra_VHH14 - | GGGS | his | 100 | 27258 |
| hIL2Rg_VHH19 | | | | |
| hIL10Ra_VHH14 - | No linker | his | 0 | 25242 |
| hIL2Rg_VHH19 | | | | |
| hIL10Ra_VHH14 - | No linker | his | 0.0001 | 19660 |
| hIL2Rg_VHH19 | | | | |
| hIL10Ra_VHH14 - | No linker | his | 0.001 | 22316 |
| hIL2Rg_VHH19 | | | | |
| hIL10Ra_VHH14 - | No linker | his | 0.01 | 22237 |
| hIL2Rg_VHH19 | | | | |
| hIL10Ra_VHH14 - | No linker | his | 0.1 | 22894 |
| hIL2Rg_VHH19 | | | | |
| hIL10Ra_VHH14 - | No linker | his | 1 | 24422 |
| hIL2Rg_VHH19 | | | | |
| hIL10Ra_VHH14 - | No linker | his | 10 | 26020 |
| hIL2Rg_VHH19 | | | | |
| hIL10Ra_VHH14 - | No linker | his | 100 | 27507 |
| hIL2Rg_VHH19 | | | | |
| hIL10Ra_VHH14 - | GS | his | 0 | 25242 |
| hIL2Rg_VHH19 | | | | |
| hIL10Ra_VHH14 - | GS | his | 0.0001 | 19871 |
| hIL2Rg_VHH19 | | | | |
| hIL10Ra_VHH14 - | GS | his | 0.001 | 22696 |
| hIL2Rg_VHH19 | | | | |
| hIL10Ra_VHH14 - | GS | his | 0.01 | 25887 |
| hIL2Rg_VHH19 | | | | |
| hIL10Ra_VHH14 - | GS | his | 0.1 | 26102 |
| hIL2Rg_VHH19 | | | | |
| hIL10Ra_VHH14 - | GS | his | 1 | 27877 |
| hIL2Rg_VHH19 | | | | |
| hIL10Ra_VHH14 - | GS | his | 10 | 28634 |
| hIL2Rg_VHH19 | | | | |
| hIL10Ra_VHH14 - | GS | his | 100 | 28383 |
| hIL2Rg_VHH19 | | | | |
| hIL10Ra_VHH14 - | GGSGGS | his | 0 | 25242 |
| hIL2Rg_VHH19 | | | | |
| hIL10Ra_VHH14 - | GGSGGS | his | 0.0001 | 20762 |
| hIL2Rg_VHH19 | | | | |
| hIL10Ra_VHH14 - | GGSGGS | his | 0.001 | 22985 |
| hIL2Rg_VHH19 | | | | |
| hIL10Ra_VHH14 - | GGSGGS | his | 0.01 | 25327 |
| hIL2Rg_VHH19 | | | | |
| hIL10Ra_VHH14 - | GGSGGS | his | 0.1 | 27132 |
| hIL2Rg_VHH19 | | | | |
| hIL10Ra_VHH14 - | GGSGGS | his | 1 | 28702 |
| hIL2Rg_VHH19 | | | | |
| hIL10Ra_VHH14 - | GGSGGS | his | 10 | 29363 |
| hIL2Rg_VHH19 | | | | |
| hIL10Ra_VHH14 - | GGSGGS | his | 100 | 25620 |
| hIL2Rg_VHH19 | | | | |
| hIL10Ra_VHH14 - | GGGSGGGS | his | 0 | 25242 |
| hIL2Rg_VHH19 | | | | |
| hIL10Ra_VHH14 - | GGGSGGGS | his | 0.0001 | 19660 |
| hIL2Rg_VHH19 | | | | |
| hIL10Ra_VHH14 - | GGGSGGGS | his | 0.001 | 22300 |
| hIL2Rg_VHH19 | | | | |
| hIL10Ra_VHH14 - | GGGSGGGS | his | 0.01 | 22652 |
| hIL2Rg_VHH19 | | | | |
| hIL10Ra_VHH14 - | GGGSGGGS | his | 0.1 | 26036 |
| hIL2Rg_VHH19 | | | | |
| hIL10Ra_VHH14 - | GGGSGGGS | his | 1 | 30060 |
| hIL2Rg_VHH19 | | | | |
| hIL10Ra_VHH14 - | GGGSGGGS | his | 10 | 29261 |
| hIL2Rg_VHH19 | | | | |
| hIL10Ra_VHH14 - | GGGSGGGS | his | 100 | 24800 |
| hIL2Rg_VHH19 | | | | |
| hIL10Ra_VHH14 - | GGSGGSGGSG | his | 0 | 25242 |
| hIL2Rg_VHH19 | | | | |
| hIL10Ra_VHH14 - | GGSGGSGGSG | his | 0.0001 | 20606 |
| hIL2Rg_VHH19 | | | | |
| hIL10Ra_VHH14 - | GGSGGSGGSG | his | 0.001 | 25240 |
| hIL2Rg_VHH19 | | | | |
| hIL10Ra_VHH14 - | GGSGGSGGSG | his | 0.01 | 28085 |
| hIL2Rg_VHH19 | | | | |
| hIL10Ra_VHH14 - | GGSGGSGGSG | his | 0.1 | 29307 |
| hIL2Rg_VHH19 | | | | |
| hIL10Ra_VHH14 - | GGSGGSGGSG | his | 1 | 30958 |
| hIL2Rg_VHH19 | | | | |
| hIL10Ra_VHH14 - | GGSGGSGGSG | his | 10 | 31489 |
| hIL2Rg_VHH19 | | | | |
| hIL10Ra_VHH14 - | GGSGGSGGSG | his | 100 | 29905 |
| hIL2Rg_VHH19 | | | | |

TABLE 25
Activity of VHH dimers on CD8 T cell
Granzyme B secretion.

| | | | Concen- | |
|---|---|---|---|---|
| | | | tration | |
| | | | of | Gran- |
| | | | molecule | zyme B |
| VHH1 - VHH2 ID | Linker | Tag | (μM) | (pg/mL) |
| hIL10Ra_VHH14 - | GGGS | Fc | 0 | 77743 |
| hIL2Rg_VHH19 | | | | |
| hIL10Ra_VHH14 - | GGGS | Fc | 0.0001 | 54536 |
| hIL2Rg_VHH19 | | | | |
| hIL10Ra_VHH14 - | GGGS | Fc | 0.001 | 60933 |
| hIL2Rg_VHH19 | | | | |
| hIL10Ra_VHH14 - | GGGS | Fc | 0.01 | 78976 |
| hIL2Rg_VHH19 | | | | |
| hIL10Ra_VHH14 - | GGGS | Fc | 0.1 | 108176 |
| hIL2Rg_VHH19 | | | | |
| hIL10Ra_VHH14 - | GGGS | Fc | 1 | 134135 |
| hIL2Rg_VHH19 | | | | |
| hIL10Ra_VHH14 - | GGGS | Fc | 10 | 151338 |
| hIL2Rg_VHH19 | | | | |
| hIL10Ra_VHH14 - | GGGS | Fc | 100 | 93281 |
| hIL2Rg_VHH19 | | | | |
| hIL10Ra_VHH14 - | GGGS | his | 0 | 77743 |
| hIL2Rg_VHH19 | | | | |
| hIL10Ra_VHH14 - | GGGS | his | 0.0001 | 49291 |
| hIL2Rg_VHH19 | | | | |
| hIL10Ra_VHH14 - | GGGS | his | 0.001 | 45559 |
| hIL2Rg_VHH19 | | | | |
| hIL10Ra_VHH14 - | GGGS | his | 0.01 | 48088 |
| hIL2Rg_VHH19 | | | | |
| hIL10Ra_VHH14 - | GGGS | his | 0.1 | 55281 |
| hIL2Rg_VHH19 | | | | |
| hIL10Ra_VHH14 - | GGGS | his | 1 | 72656 |
| hIL2Rg_VHH19 | | | | |
| hIL10Ra_VHH14 - | GGGS | his | 10 | 84685 |
| hIL2Rg_VHH19 | | | | |
| hIL10Ra_VHH14 - | GGGS | his | 100 | 94573 |
| hIL2Rg_VHH19 | | | | |
| hIL10Ra_VHH14 - | No linker | his | 0 | 77743 |
| hIL2Rg_VHH19 | | | | |
| hIL10Ra_VHH14 - | No linker | his | 0.0001 | 49323 |
| hIL2Rg_VHH19 | | | | |
| hIL10Ra_VHH14 - | No linker | his | 0.001 | 47261 |
| hIL2Rg_VHH19 | | | | |
| hIL10Ra_VHH14 - | No linker | his | 0.01 | 44212 |
| hIL2Rg_VHH19 | | | | |
| hIL10Ra_VHH14 - | No linker | his | 0.1 | 54822 |
| hIL2Rg_VHH19 | | | | |
| hIL10Ra_VHH14 - | No linker | his | 1 | 56290 |
| hIL2Rg_VHH19 | | | | |
| hIL10Ra_VHH14 - | No linker | his | 10 | 67061 |
| hIL2Rg_VHH19 | | | | |
| hIL10Ra_VHH14 - | No linker | his | 100 | 74310 |
| hIL2Rg_VHH19 | | | | |
| hIL10Ra_VHH14 - | GS | his | 0 | 77743 |
| hIL2Rg_VHH19 | | | | |
| hIL10Ra_VHH14 - | GS | his | 0.0001 | 49205 |
| hIL2Rg_VHH19 | | | | |
| hIL10Ra_VHH14 - | GS | his | 0.001 | 49379 |
| hIL2Rg_VHH19 | | | | |
| hIL10Ra_VHH14 - | GS | his | 0.01 | 55456 |
| hIL2Rg_VHH19 | | | | |
| hIL10Ra_VHH14 - | GS | his | 0.1 | 58033 |
| hIL2Rg_VHH19 | | | | |
| hIL10Ra_VHH14 - | GS | his | 1 | 80216 |
| hIL2Rg_VHH19 | | | | |
| hIL10Ra_VHH14 - | GS | his | 10 | 86955 |
| hIL2Rg_VHH19 | | | | |
| hIL10Ra_VHH14 - | GS | his | 100 | 99876 |
| hIL2Rg_VHH19 | | | | |
| hIL10Ra_VHH14 - | GGSGGS | his | 0 | 77743 |
| hIL2Rg_VHH19 | | | | |
| hIL10Ra_VHH14 - | GGSGGS | his | 0.0001 | 54496 |
| hIL2Rg_VHH19 | | | | |
| hIL10Ra_VHH14 - | GGSGGS | his | 0.001 | 50920 |
| hIL2Rg_VHH19 | | | | |
| hIL10Ra_VHH14 - | GGSGGS | his | 0.01 | 54056 |
| hIL2Rg_VHH19 | | | | |
| hIL10Ra_VHH14 - | GGSGGS | his | 0.1 | 62317 |
| hIL2Rg_VHH19 | | | | |
| hIL10Ra_VHH14 - | GGSGGS | his | 1 | 77563 |
| hIL2Rg_VHH19 | | | | |
| hIL10Ra_VHH14 - | GGSGGS | his | 10 | 89980 |
| hIL2Rg_VHH19 | | | | |
| hIL10Ra_VHH14 - | GGSGGS | his | 100 | 77902 |
| hIL2Rg_VHH19 | | | | |
| hIL10Ra_VHH14 - | GGGSGGGS | his | 0 | 77743 |
| hIL2Rg_VHH19 | | | | |
| hIL10Ra_VHH14 - | GGGSGGGS | his | 0.0001 | 52639 |
| hIL2Rg_VHH19 | | | | |
| hIL10Ra_VHH14 - | GGGSGGGS | his | 0.001 | 45454 |
| hIL2Rg_VHH19 | | | | |
| hIL10Ra_VHH14 - | GGGSGGGS | his | 0.01 | 47256 |
| hIL2Rg_VHH19 | | | | |
| hIL10Ra_VHH14 - | GGGSGGGS | his | 0.1 | 62245 |
| hIL2Rg_VHH19 | | | | |
| hIL10Ra_VHH14 - | GGGSGGGS | his | 1 | 80475 |
| hIL2Rg_VHH19 | | | | |
| hIL10Ra_VHH14 - | GGGSGGGS | his | 10 | 83472 |
| hIL2Rg_VHH19 | | | | |
| hIL10Ra_VHH14 - | GGGSGGGS | his | 100 | 78110 |
| hIL2Rg_VHH19 | | | | |
| hIL10Ra_VHH14 - | GGSGGSGGSG | his | 0 | 77743 |
| hIL2Rg_VHH19 | | | | |
| hIL10Ra_VHH14 - | GGSGGSGGSG | his | 0.0001 | 68889 |
| hIL2Rg_VHH19 | | | | |
| hIL10Ra_VHH14 - | GGSGGSGGSG | his | 0.001 | 70609 |
| hIL2Rg_VHH19 | | | | |
| hIL10Ra_VHH14 - | GGSGGSGGSG | his | 0.01 | 70990 |
| hIL2Rg_VHH19 | | | | |
| hIL10Ra_VHH14 - | GGSGGSGGSG | his | 0.1 | 79349 |
| hIL2Rg_VHH19 | | | | |
| hIL10Ra_VHH14 - | GGSGGSGGSG | his | 1 | 111535 |
| hIL2Rg_VHH19 | | | | |
| hIL10Ra_VHH14 - | GGSGGSGGSG | his | 10 | 125459 |
| hIL2Rg_VHH19 | | | | |
| hIL10Ra_VHH14 - | GGSGGSGGSG | his | 100 | 106090 |
| hIL2Rg_VHH19 | | | | |

TABLE 26
Activity of VHH dimers on CD8 T
cell IL-9 secretion.

| | | | Concen- | |
|---|---|---|---|---|
| | | | tration | |
| | | | of | |
| | | | molecule | IL-9 |
| VHH1 - VHH2 ID | Linker | Tag | (μM) | (pg/mL) |
| hIL10Ra_VHH14 - | GGGS | Fc | 0 | 1348 |
| hIL2Rg_VHH19 | | | | |
| hIL10Ra_VHH14 - | GGGS | Fc | 0.0001 | 1055 |
| hIL2Rg_VHH19 | | | | |
| hIL10Ra_VHH14 - | GGGS | Fc | 0.001 | 1116 |
| hIL2Rg_VHH19 | | | | |
| hIL10Ra_VHH14 - | GGGS | Fc | 0.01 | 1162 |
| hIL2Rg_VHH19 | | | | |
| hIL10Ra_VHH14 - | GGGS | Fc | 0.1 | 1424 |
| hIL2Rg_VHH19 | | | | |
| hIL10Ra_VHH14 - | GGGS | Fc | 1 | 1782 |
| hIL2Rg_VHH19 | | | | |
| hIL10Ra_VHH14 - | GGGS | Fc | 10 | 2146 |
| hIL2Rg_VHH19 | | | | |
| hIL10Ra_VHH14 - | GGGS | Fc | 100 | 1926 |
| hIL2Rg_VHH19 | | | | |
| hIL10Ra_VHH14 - | GGGS | his | 0 | 1348 |
| hIL2Rg_VHH19 | | | | |
| hIL10Ra_VHH14 - | GGGS | his | 0.0001 | 941 |
| hIL2Rg_VHH19 | | | | |
| hIL10Ra_VHH14 - | GGGS | his | 0.001 | 1001 |
| hIL2Rg_VHH19 | | | | |
| hIL10Ra_VHH14 - | GGGS | his | 0.01 | 1117 |
| hIL2Rg_VHH19 | | | | |
| hIL10Ra_VHH14 - | GGGS | his | 0.1 | 1338 |
| hIL2Rg_VHH19 | | | | |
| hIL10Ra_VHH14 - | GGGS | his | 1 | 1399 |
| hIL2Rg_VHH19 | | | | |
| hIL10Ra_VHH14 - | GGGS | his | 10 | 1685 |
| hIL2Rg_VHH19 | | | | |
| hIL10Ra_VHH14 - | GGGS | his | 100 | 1707 |
| hIL2Rg_VHH19 | | | | |
| hIL10Ra_VHH14 - | No linker | his | 0 | 1348 |
| hIL2Rg_VHH19 | | | | |
| hIL10Ra_VHH14 - | No linker | his | 0.0001 | 933 |
| hIL2Rg_VHH19 | | | | |
| hIL10Ra_VHH14 - | No linker | his | 0.001 | 1125 |
| hIL2Rg_VHH19 | | | | |
| hIL10Ra_VHH14 - | No linker | his | 0.01 | 1141 |
| hIL2Rg_VHH19 | | | | |
| hIL10Ra_VHH14 - | No linker | his | 0.1 | 1066 |
| hIL2Rg_VHH19 | | | | |
| hIL10Ra_VHH14 - | No linker | his | 1 | 1216 |
| hIL2Rg_VHH19 | | | | |
| hIL10Ra_VHH14 - | No linker | his | 10 | 1438 |
| hIL2Rg_VHH19 | | | | |
| hIL10Ra_VHH14 - | No linker | his | 100 | 1666 |
| hIL2Rg_VHH19 | | | | |
| hIL10Ra_VHH14 - | GS | his | 0 | 1348 |
| hIL2Rg_VHH19 | | | | |
| hIL10Ra_VHH14 - | GS | his | 0.0001 | 918 |
| hIL2Rg_VHH19 | | | | |
| hIL10Ra_VHH14 - | GS | his | 0.001 | 998 |
| hIL2Rg_VHH19 | | | | |
| hIL10Ra_VHH14 - | GS | his | 0.01 | 1072 |
| hIL2Rg_VHH19 | | | | |
| hIL10Ra_VHH14 - | GS | his | 0.1 | 1228 |
| hIL2Rg_VHH19 | | | | |
| hIL10Ra_VHH14 - | GS | his | 1 | 1608 |
| hIL2Rg_VHH19 | | | | |
| hIL10Ra_VHH14 - | GS | his | 10 | 1729 |
| hIL2Rg_VHH19 | | | | |
| hIL10Ra_VHH14 - | GS | his | 100 | 1882 |
| hIL2Rg_VHH19 | | | | |
| hIL10Ra_VHH14 - | GGSGGS | his | 0 | 1348 |
| hIL2Rg_VHH19 | | | | |
| hIL10Ra_VHH14 - | GGSGGS | his | 0.0001 | 951 |
| hIL2Rg_VHH19 | | | | |
| hIL10Ra_VHH14 - | GGSGGS | his | 0.001 | 1006 |
| hIL2Rg_VHH19 | | | | |
| hIL10Ra_VHH14 - | GGSGGS | his | 0.01 | 1144 |
| hIL2Rg_VHH19 | | | | |
| hIL10Ra_VHH14 - | GGSGGS | his | 0.1 | 1090 |
| hIL2Rg_VHH19 | | | | |
| hIL10Ra_VHH14 - | GGSGGS | his | 1 | 1436 |
| hIL2Rg_VHH19 | | | | |
| hIL10Ra_VHH14 - | GGSGGS | his | 10 | 1604 |
| hIL2Rg_VHH19 | | | | |
| hIL10Ra_VHH14 - | GGSGGS | his | 100 | 1698 |
| hIL2Rg_VHH19 | | | | |
| hIL10Ra_VHH14 - | GGGSGGGS | his | 0 | 1348 |
| hIL2Rg_VHH19 | | | | |
| hIL10Ra_VHH14 - | GGGSGGGS | his | 0.0001 | 988 |
| hIL2Rg_VHH19 | | | | |
| hIL10Ra_VHH14 - | GGGSGGGS | his | 0.001 | 1053 |
| hIL2Rg_VHH19 | | | | |
| hIL10Ra_VHH14 - | GGGSGGGS | his | 0.01 | 1007 |
| hIL2Rg_VHH19 | | | | |
| hIL10Ra_VHH14 - | GGGSGGGS | his | 0.1 | 1305 |
| hIL2Rg_VHH19 | | | | |
| hIL10Ra_VHH14 - | GGGSGGGS | his | 1 | 1381 |
| hIL2Rg_VHH19 | | | | |
| hIL10Ra_VHH14 - | GGGSGGGS | his | 10 | 1885 |
| hIL2Rg_VHH19 | | | | |
| hIL10Ra_VHH14 - | GGGSGGGS | his | 100 | 1700 |
| hIL2Rg_VHH19 | | | | |
| hIL10Ra_VHH14 - | GGSGGSGGSG | his | 0 | 1348 |
| hIL2Rg_VHH19 | | | | |
| hIL10Ra_VHH14 - | GGSGGSGGSG | his | 0.0001 | 1007 |
| hIL2Rg_VHH19 | | | | |
| hIL10Ra_VHH14 - | GGSGGSGGSG | his | 0.001 | 1315 |
| hIL2Rg_VHH19 | | | | |
| hIL10Ra_VHH14 - | GGSGGSGGSG | his | 0.01 | 1391 |
| hIL2Rg_VHH19 | | | | |
| hIL10Ra_VHH14 - | GGSGGSGGSG | his | 0.1 | 1449 |
| hIL2Rg_VHH19 | | | | |
| hIL10Ra_VHH14 - | GGSGGSGGSG | his | 1 | 1588 |
| hIL2Rg_VHH19 | | | | |
| hIL10Ra_VHH14 - | GGSGGSGGSG | his | 10 | 2052 |
| hIL2Rg_VHH19 | | | | |
| hIL10Ra_VHH14 - | GGSGGSGGSG | his | 100 | 1965 |
| hIL2Rg_VHH19 | | | | |

TABLE 27
Activity of VHH dimers on LPS treated Monocyte IL-1B secretion.

| | | | Concentration | |
|---|---|---|---|---|
| VHH1-VHH2 | | | of | IL-1β |
| ID | Linker | Tag | molecule (μM) | (pg/mL) |
| hIL10Ra_VHH14- | GGGS | Fc | 0 | 6244 |
| hIL2Rg_VHH19 | | | | |
| hIL10Ra_VHH14- | GGGS | Fc | 0 | 6880 |
| hIL2Rg_VHH19 | | | (LPS only) | |
| hIL10Ra_VHH14- | GGGS | Fc | 0.0001 | 6290 |
| hIL2Rg_VHH19 | | | | |
| hIL10Ra_VHH14- | GGGS | Fc | 0.001 | 5571 |
| hIL2Rg_VHH19 | | | | |
| hIL10Ra_VHH14- | GGGS | Fc | 0.01 | 5259 |
| hIL2Rg_VHH19 | | | | |
| hIL10Ra_VHH14- | GGGS | Fc | 0.1 | 4018 |
| hIL2Rg_VHH19 | | | | |
| hIL10Ra_VHH14- | GGGS | Fc | 1 | 3665 |
| hIL2Rg_VHH19 | | | | |
| hIL10Ra_VHH14- | GGGS | Fc | 10 | 4143 |
| hIL2Rg_VHH19 | | | | |
| hIL10Ra_VHH14- | GGGS | Fc | 100 | 6478 |
| hIL2Rg_VHH19 | | | | |
| hIL10Ra_VHH14- | GGGS | his | 0 | 6244 |
| hIL2Rg_VHH19 | | | | |
| hIL10Ra_VHH14- | GGGS | his | 0 | 6880 |
| hIL2Rg_VHH19 | | | (LPS only) | |
| hIL10Ra_VHH14- | GGGS | his | 0.0001 | 6424 |
| hIL2Rg_VHH19 | | | | |
| hIL10Ra_VHH14- | GGGS | his | 0.001 | 6644 |
| hIL2Rg_VHH19 | | | | |
| hIL10Ra_VHH14- | GGGS | his | 0.01 | 5763 |
| hIL2Rg_VHH19 | | | | |
| hIL10Ra_VHH14- | GGGS | his | 0.1 | 6124 |
| hIL2Rg_VHH19 | | | | |
| hIL10Ra_VHH14- | GGGS | his | 1 | 5354 |
| hIL2Rg_VHH19 | | | | |
| hIL10Ra_VHH14- | GGGS | his | 10 | 5951 |
| hIL2Rg_VHH19 | | | | |
| hIL10Ra_VHH14- | GGGS | his | 100 | 6580 |
| hIL2Rg_VHH19 | | | | |
| hIL10Ra_VHH14- | No linker | his | 0 | 6244 |
| hIL2Rg_VHH19 | | | | |
| hIL10Ra_VHH14- | No linker | his | 0 | 6880 |
| hIL2Rg_VHH19 | | | (LPS only) | |
| hIL10Ra_VHH14- | No linker | his | 0.0001 | 5541 |
| hIL2Rg_VHH19 | | | | |
| hIL10Ra_VHH14- | No linker | his | 0.001 | 5549 |
| hIL2Rg_VHH19 | | | | |
| hIL10Ra_VHH14- | No linker | his | 0.01 | 5373 |
| hIL2Rg_VHH19 | | | | |
| hIL10Ra_VHH14- | No linker | his | 0.1 | 5290 |
| hIL2Rg_VHH19 | | | | |
| hIL10Ra_VHH14- | No linker | his | 1 | 5801 |
| hIL2Rg_VHH19 | | | | |
| hIL10Ra_VHH14- | No linker | his | 10 | 5792 |
| hIL2Rg_VHH19 | | | | |
| hIL10Ra_VHH14- | No linker | his | 100 | 7100 |
| hIL2Rg_VHH19 | | | | |
| hIL10Ra_VHH14- | GS | his | 0 | 6244 |
| hIL2Rg_VHH19 | | | | |
| hIL10Ra_VHH14- | GS | his | 0 | 6880 |
| hIL2Rg_VHH19 | | | (LPS only) | |
| hIL10Ra_VHH14- | GS | his | 0.0001 | 5964 |
| hIL2Rg_VHH19 | | | | |
| hIL10Ra_VHH14- | GS | his | 0.001 | 6266 |
| hIL2Rg_VHH19 | | | | |
| hIL10Ra_VHH14- | GS | his | 0.01 | 5065 |
| hIL2Rg_VHH19 | | | | |
| hIL10Ra_VHH14- | GS | his | 0.1 | 6592 |
| hIL2Rg_VHH19 | | | | |
| hIL10Ra_VHH14- | GS | his | 1 | 5765 |
| hIL2Rg_VHH19 | | | | |
| hIL10Ra_VHH14- | GS | his | 10 | 6707 |
| hIL2Rg_VHH19 | | | | |
| hIL10Ra_VHH14- | GS | his | 100 | 8142 |
| hIL2Rg_VHH19 | | | | |
| hIL10Ra_VHH14- | GGSGGS | his | 0 | 6244 |
| hIL2Rg_VHH19 | | | | |
| hIL10Ra_VHH14- | GGSGGS | his | 0 | 6880 |
| hIL2Rg_VHH19 | | | (LPS only) | |
| hIL10Ra_VHH14- | GGSGGS | his | 0.0001 | 6288 |
| hIL2Rg_VHH19 | | | | |
| hIL10Ra_VHH14- | GGSGGS | his | 0.001 | 5849 |
| hIL2Rg_VHH19 | | | | |
| hIL10Ra_VHH14- | GGSGGS | his | 0.01 | 6103 |
| hIL2Rg_VHH19 | | | | |
| hIL10Ra_VHH14- | GGSGGS | his | 0.1 | 4955 |
| hIL2Rg_VHH19 | | | | |
| hIL10Ra_VHH14- | GGSGGS | his | 1 | 5780 |
| hIL2Rg_VHH19 | | | | |
| hIL10Ra_VHH14- | GGSGGS | his | 10 | 6425 |
| hIL2Rg_VHH19 | | | | |
| hIL10Ra_VHH14- | GGSGGS | his | 100 | 7844 |
| hIL2Rg_VHH19 | | | | |
| hIL10Ra_VHH14- | GGGSGGGS | his | 0 | 6244 |
| hIL2Rg_VHH19 | | | | |
| hIL10Ra_VHH14- | GGGSGGGS | his | 0 | 6880 |
| hIL2Rg_VHH19 | | | (LPS only) | |
| hIL10Ra_VHH14- | GGGSGGGS | his | 0.0001 | 5950 |
| hIL2Rg_VHH19 | | | | |
| hIL10Ra_VHH14- | GGGSGGGS | his | 0.001 | 6200 |
| hIL2Rg_VHH19 | | | | |
| hIL10Ra_VHH14- | GGGSGGGS | his | 0.01 | 4959 |
| hIL2Rg_VHH19 | | | | |
| hIL10Ra_VHH14- | GGGSGGGS | his | 0.1 | 5594 |
| hIL2Rg_VHH19 | | | | |
| hIL10Ra_VHH14- | GGGSGGGS | his | 1 | 5672 |
| hIL2Rg_VHH19 | | | | |
| hIL10Ra_VHH14- | GGGSGGGS | his | 10 | 6017 |
| hIL2Rg_VHH19 | | | | |
| hIL10Ra_VHH14- | GGGSGGGS | his | 100 | 6843 |
| hIL2Rg_VHH19 | | | | |
| hIL10Ra_VHH14- | GGSGGSGGSG | his | 0 | 6244 |
| hIL2Rg_VHH19 | | | | |
| hIL10Ra_VHH14- | GGSGGSGGSG | his | 0 | 6880 |
| hIL2Rg_VHH19 | | | (LPS only) | |
| hIL10Ra_VHH14- | GGSGGSGGSG | his | 0.0001 | 5894 |
| hIL2Rg_VHH19 | | | | |
| hIL10Ra_VHH14- | GGSGGSGGSG | his | 0.001 | 5389 |
| hIL2Rg_VHH19 | | | | |
| hIL10Ra_VHH14- | GGSGGSGGSG | his | 0.01 | 6018 |
| hIL2Rg_VHH19 | | | | |
| hIL10Ra_VHH14- | GGSGGSGGSG | his | 0.1 | 5241 |
| hIL2Rg_VHH19 | | | | |
| hIL10Ra_VHH14- | GGSGGSGGSG | his | 1 | 5680 |
| hIL2Rg_VHH19 | | | | |
| hIL10Ra_VHH14- | GGSGGSGGSG | his | 10 | 7124 |
| hIL2Rg_VHH19 | | | | |
| hIL10Ra_VHH14- | GGSGGSGGSG | his | 100 | 8781 |
| hIL2Rg_VHH19 | | | | |

TABLE 28
Activity of VHH dimers on LPS
treated Monocyte IL-6 secretion.

| | | | Concen- | |
|---|---|---|---|---|
| | | | tration | |
| | | | of | |
| | | | molecule | IL-6 |
| VHH1 - VHH2 ID | Linker | Tag | (μM) | (pg/mL) |
| hIL10Ra_VHH14 - | GGGS | Fc | 0 | 31269 |
| hIL2Rg_VHH19 | | | | |
| hIL10Ra_VHH14 - | GGGS | Fc | 0 (LPS | 45404 |
| hIL2Rg_VHH19 | | | only) | |
| hIL10Ra_VHH14 - | GGGS | Fc | 0.0001 | 36196 |
| hIL2Rg_VHH19 | | | | |
| hIL10Ra_VHH14 - | GGGS | Fc | 0.001 | 30932 |
| hIL2Rg_VHH19 | | | | |
| hIL10Ra_VHH14 - | GGGS | Fc | 0.01 | 27747 |
| hIL2Rg_VHH19 | | | | |
| hIL10Ra_VHH14 - | GGGS | Fc | 0.1 | 24512 |
| hIL2Rg_VHH19 | | | | |
| hIL10Ra_VHH14 - | GGGS | Fc | 1 | 21794 |
| hIL2Rg_VHH19 | | | | |
| hIL10Ra_VHH14 - | GGGS | Fc | 10 | 31465 |
| hIL2Rg_VHH19 | | | | |
| hIL10Ra_VHH14 - | GGGS | Fc | 100 | 44297 |
| hIL2Rg_VHH19 | | | | |
| hIL10Ra_VHH14 - | GGGS | his | 0 | 31269 |
| hIL2Rg_VHH19 | | | | |
| hIL10Ra_VHH14 - | GGGS | his | 0 (LPS | 45404 |
| hIL2Rg_VHH19 | | | only) | |
| hIL10Ra_VHH14 - | GGGS | his | 0.0001 | 39223 |
| hIL2Rg_VHH19 | | | | |
| hIL10Ra_VHH14 - | GGGS | his | 0.001 | 41699 |
| hIL2Rg_VHH19 | | | | |
| hIL10Ra_VHH14 - | GGGS | his | 0.01 | 33346 |
| hIL2Rg_VHH19 | | | | |
| hIL10Ra_VHH14 - | GGGS | his | 0.1 | 32608 |
| hIL2Rg_VHH19 | | | | |
| hIL10Ra_VHH14 - | GGGS | his | 1 | 24493 |
| hIL2Rg_VHH19 | | | | |
| hIL10Ra_VHH14 - | GGGS | his | 10 | 30616 |
| hIL2Rg_VHH19 | | | | |
| hIL10Ra_VHH14 - | GGGS | his | 100 | 32878 |
| hIL2Rg_VHH19 | | | | |
| hIL10Ra_VHH14 - | No linker | his | 0 | 31269 |
| hIL2Rg_VHH19 | | | | |
| hIL10Ra_VHH14 - | No linker | his | 0 (LPS | 45404 |
| hIL2Rg_VHH19 | | | only) | |
| hIL10Ra_VHH14 - | No linker | his | 0.0001 | 30458 |
| hIL2Rg_VHH19 | | | | |
| hIL10Ra_VHH14 - | No linker | his | 0.001 | 31485 |
| hIL2Rg_VHH19 | | | | |
| hIL10Ra_VHH14 - | No linker | his | 0.01 | 30025 |
| hIL2Rg_VHH19 | | | | |
| hIL10Ra_VHH14 - | No linker | his | 0.1 | 37420 |
| hIL2Rg_VHH19 | | | | |
| hIL10Ra_VHH14 - | No linker | his | 1 | 27897 |
| hIL2Rg_VHH19 | | | | |
| hIL10Ra_VHH14 - | No linker | his | 10 | 33304 |
| hIL2Rg_VHH19 | | | | |
| hIL10Ra_VHH14 - | No linker | his | 100 | 36593 |
| hIL2Rg_VHH19 | | | | |
| hIL10Ra_VHH14 - | GS | his | 0 | 31269 |
| hIL2Rg_VHH19 | | | | |
| hIL10Ra_VHH14 - | GS | his | 0 (LPS | 45404 |
| hIL2Rg_VHH19 | | | only) | |
| hIL10Ra_VHH14 - | GS | his | 0.0001 | 32766 |
| hIL2Rg_VHH19 | | | | |
| hIL10Ra_VHH14 - | GS | his | 0.001 | 42398 |
| hIL2Rg_VHH19 | | | | |
| hIL10Ra_VHH14 - | GS | his | 0.01 | 19882 |
| hIL2Rg_VHH19 | | | | |
| hIL10Ra_VHH14 - | GS | his | 0.1 | 41496 |
| hIL2Rg_VHH19 | | | | |
| hIL10Ra_VHH14 - | GS | his | 1 | 29074 |
| hIL2Rg_VHH19 | | | | |
| hIL10Ra_VHH14 - | GS | his | 10 | 47742 |
| hIL2Rg_VHH19 | | | | |
| hIL10Ra_VHH14 - | GS | his | 100 | 50764 |
| hIL2Rg_VHH19 | | | | |
| hIL10Ra_VHH14 - | GGSGGS | his | 0 | 31269 |
| hIL2Rg_VHH19 | | | | |
| hIL10Ra_VHH14 - | GGSGGS | his | 0 (LPS | 45404 |
| hIL2Rg_VHH19 | | | only) | |
| hIL10Ra_VHH14 - | GGSGGS | his | 0.0001 | 34223 |
| hIL2Rg_VHH19 | | | | |
| hIL10Ra_VHH14 - | GGSGGS | his | 0.001 | 33794 |
| hIL2Rg_VHH19 | | | | |
| hIL10Ra_VHH14 - | GGSGGS | his | 0.01 | 30119 |
| hIL2Rg_VHH19 | | | | |
| hIL10Ra_VHH14 - | GGSGGS | his | 0.1 | 27763 |
| hIL2Rg_VHH19 | | | | |
| hIL10Ra_VHH14 - | GGSGGS | his | 1 | 26000 |
| hIL2Rg_VHH19 | | | | |
| hIL10Ra_VHH14 - | GGSGGS | his | 10 | 38429 |
| hIL2Rg_VHH19 | | | | |
| hIL10Ra_VHH14 - | GGSGGS | his | 100 | 48903 |
| hIL2Rg_VHH19 | | | | |
| hIL10Ra_VHH14 - | GGGSGGGS | his | 0 | 31269 |
| hIL2Rg_VHH19 | | | | |
| hIL10Ra_VHH14 - | GGGSGGGS | his | 0 (LPS | 45404 |
| hIL2Rg_VHH19 | | | only) | |
| hIL10Ra_VHH14 - | GGGSGGGS | his | 0.0001 | 36784 |
| hIL2Rg_VHH19 | | | | |
| hIL10Ra_VHH14 - | GGGSGGGS | his | 0.001 | 46305 |
| hIL2Rg_VHH19 | | | | |
| hIL10Ra_VHH14 - | GGGSGGGS | his | 0.01 | 21646 |
| hIL2Rg_VHH19 | | | | |
| hIL10Ra_VHH14 - | GGGSGGGS | his | 0.1 | 35779 |
| hIL2Rg_VHH19 | | | | |
| hIL10Ra_VHH14 - | GGGSGGGS | his | 1 | 27065 |
| hIL2Rg_VHH19 | | | | |
| hIL10Ra_VHH14 - | GGGSGGGS | his | 10 | 29227 |
| hIL2Rg_VHH19 | | | | |
| hIL10Ra_VHH14 - | GGGSGGGS | his | 100 | 36634 |
| hIL2Rg_VHH19 | | | | |
| hIL10Ra_VHH14 - | GGSGGSGGSG | his | 0 | 31269 |
| hIL2Rg_VHH19 | | | | |
| hIL10Ra_VHH14 - | GGSGGSGGSG | his | 0 (LPS | 45404 |
| hIL2Rg_VHH19 | | | only) | |
| hIL10Ra_VHH14 - | GGSGGSGGSG | his | 0.0001 | 32788 |
| hIL2Rg_VHH19 | | | | |
| hIL10Ra_VHH14 - | GGSGGSGGSG | his | 0.001 | 41119 |
| hIL2Rg_VHH19 | | | | |
| hIL10Ra_VHH14 - | GGSGGSGGSG | his | 0.01 | 37396 |
| hIL2Rg_VHH19 | | | | |
| hIL10Ra_VHH14 - | GGSGGSGGSG | his | 0.1 | 35343 |
| hIL2Rg_VHH19 | | | | |
| hIL10Ra_VHH14 - | GGSGGSGGSG | his | 1 | 29405 |
| hIL2Rg_VHH19 | | | | |
| hIL10Ra_VHH14 - | GGSGGSGGSG | his | 10 | 49333 |
| hIL2Rg_VHH19 | | | | |
| hIL10Ra_VHH14 - | GGSGGSGGSG | his | 100 | 55000 |
| hIL2Rg_VHH19 | | | | |

TABLE 29
Activity of VHH dimers on LPS treated
Monocyte TNF-α secretion.

| | | | Concen- | |
|---|---|---|---|---|
| | | | tration | |
| | | | of | |
| | | | molecule | TNF-α |
| VHH1 - VHH2 ID | Linker | Tag | (μM) | (pg/mL) |
| hIL10Ra_VHH14 - | GGGS | Fc | 0 | 7455 |
| hIL2Rg_VHH19 | | | | |
| hIL10Ra_VHH14 - | GGGS | Fc | 0 (LPS | 10138 |
| hIL2Rg_VHH19 | | | only) | |
| hIL10Ra_VHH14 - | GGGS | Fc | 0.0001 | 6234 |
| hIL2Rg_VHH19 | | | | |
| hIL10Ra_VHH14 - | GGGS | Fc | 0.001 | 5120 |
| hIL2Rg_VHH19 | | | | |
| hIL10Ra_VHH14 - | GGGS | Fc | 0.01 | 5443 |
| hIL2Rg_VHH19 | | | | |
| hIL10Ra_VHH14 - | GGGS | Fc | 0.1 | 3960 |
| hIL2Rg_VHH19 | | | | |
| hIL10Ra_VHH14 - | GGGS | Fc | 1 | 2790 |
| hIL2Rg_VHH19 | | | | |
| hIL10Ra_VHH14 - | GGGS | Fc | 10 | 3887 |
| hIL2Rg_VHH19 | | | | |
| hIL10Ra_VHH14 - | GGGS | Fc | 100 | 6253 |
| hIL2Rg_VHH19 | | | | |
| hIL10Ra_VHH14 - | GGGS | his | 0 | 7455 |
| hIL2Rg_VHH19 | | | | |
| hIL10Ra_VHH14 - | GGGS | his | 0 (LPS | 10138 |
| hIL2Rg_VHH19 | | | only) | |
| hIL10Ra_VHH14 - | GGGS | his | 0.0001 | 8435 |
| hIL2Rg_VHH19 | | | | |
| hIL10Ra_VHH14 - | GGGS | his | 0.001 | 6253 |
| hIL2Rg_VHH19 | | | | |
| hIL10Ra_VHH14 - | GGGS | his | 0.01 | 5501 |
| hIL2Rg_VHH19 | | | | |
| hIL10Ra_VHH14 - | GGGS | his | 0.1 | 5631 |
| hIL2Rg_VHH19 | | | | |
| hIL10Ra_VHH14 - | GGGS | his | 1 | 4741 |
| hIL2Rg_VHH19 | | | | |
| hIL10Ra_VHH14 - | GGGS | his | 10 | 6068 |
| hIL2Rg_VHH19 | | | | |
| hIL10Ra_VHH14 - | GGGS | his | 100 | 7228 |
| hIL2Rg_VHH19 | | | | |
| hIL10Ra_VHH14 - | No linker | his | 0 | 7455 |
| hIL2Rg_VHH19 | | | | |
| hIL10Ra_VHH14 - | No linker | his | 0 (LPS | 10138 |
| hIL2Rg_VHH19 | | | only) | |
| hIL10Ra_VHH14 - | No linker | his | 0.0001 | 6656 |
| hIL2Rg_VHH19 | | | | |
| hIL10Ra_VHH14 - | No linker | his | 0.001 | 5247 |
| hIL2Rg_VHH19 | | | | |
| hIL10Ra_VHH14 - | No linker | his | 0.01 | 5400 |
| hIL2Rg_VHH19 | | | | |
| hIL10Ra_VHH14 - | No linker | his | 0.1 | 7258 |
| hIL2Rg_VHH19 | | | | |
| hIL10Ra_VHH14 - | No linker | his | 1 | 5004 |
| hIL2Rg_VHH19 | | | | |
| hIL10Ra_VHH14 - | No linker | his | 10 | 6609 |
| hIL2Rg_VHH19 | | | | |
| hIL10Ra_VHH14 - | No linker | his | 100 | 7923 |
| hIL2Rg_VHH19 | | | | |
| hIL10Ra_VHH14 - | GS | his | 0 | 7455 |
| hIL2Rg_VHH19 | | | | |
| hIL10Ra_VHH14 - | GS | his | 0 (LPS | 10138 |
| hIL2Rg_VHH19 | | | only) | |
| hIL10Ra_VHH14 - | GS | his | 0.0001 | 6800 |
| hIL2Rg_VHH19 | | | | |
| hIL10Ra_VHH14 - | GS | his | 0.001 | 6768 |
| hIL2Rg_VHH19 | | | | |
| hIL10Ra_VHH14 - | GS | his | 0.01 | 4996 |
| hIL2Rg_VHH19 | | | | |
| hIL10Ra_VHH14 - | GS | his | 0.1 | 5787 |
| hIL2Rg_VHH19 | | | | |
| hIL10Ra_VHH14 - | GS | his | 1 | 5153 |
| hIL2Rg_VHH19 | | | | |
| hIL10Ra_VHH14 - | GS | his | 10 | 6176 |
| hIL2Rg_VHH19 | | | | |
| hIL10Ra_VHH14 - | GS | his | 100 | 8029 |
| hIL2Rg_VHH19 | | | | |
| hIL10Ra_VHH14 - | GGSGGS | his | 0 | 7455 |
| hIL2Rg_VHH19 | | | | |
| hIL10Ra_VHH14 - | GGSGGS | his | 0 (LPS | 10138 |
| hIL2Rg_VHH19 | | | only) | |
| hIL10Ra_VHH14 - | GGSGGS | his | 0.0001 | 7239 |
| hIL2Rg_VHH19 | | | | |
| hIL10Ra_VHH14 - | GGSGGS | his | 0.001 | 6237 |
| hIL2Rg_VHH19 | | | | |
| hIL10Ra_VHH14 - | GGSGGS | his | 0.01 | 6102 |
| hIL2Rg_VHH19 | | | | |
| hIL10Ra_VHH14 - | GGSGGS | his | 0.1 | 5731 |
| hIL2Rg_VHH19 | | | | |
| hIL10Ra_VHH14 - | GGSGGS | his | 1 | 5739 |
| hIL2Rg_VHH19 | | | | |
| hIL10Ra_VHH14 - | GGSGGS | his | 10 | 6621 |
| hIL2Rg_VHH19 | | | | |
| hIL10Ra_VHH14 - | GGSGGS | his | 100 | 8850 |
| hIL2Rg_VHH19 | | | | |
| hIL10Ra_VHH14 - | GGGSGGGS | his | 0 | 7455 |
| hIL2Rg_VHH19 | | | | |
| hIL10Ra_VHH14 - | GGGSGGGS | his | 0 (LPS | 10138 |
| hIL2Rg_VHH19 | | | only) | |
| hIL10Ra_VHH14 - | GGGSGGGS | his | 0.0001 | 6786 |
| hIL2Rg_VHH19 | | | | |
| hIL10Ra_VHH14 - | GGGSGGGS | his | 0.001 | 7202 |
| hIL2Rg_VHH19 | | | | |
| hIL10Ra_VHH14 - | GGGSGGGS | his | 0.01 | 4699 |
| hIL2Rg_VHH19 | | | | |
| hIL10Ra_VHH14 - | GGGSGGGS | his | 0.1 | 6822 |
| hIL2Rg_VHH19 | | | | |
| hIL10Ra_VHH14 - | GGGSGGGS | his | 1 | 5620 |
| hIL2Rg_VHH19 | | | | |
| hIL10Ra_VHH14 - | GGGSGGGS | his | 10 | 6187 |
| hIL2Rg_VHH19 | | | | |
| hIL10Ra_VHH14 - | GGGSGGGS | his | 100 | 8372 |
| hIL2Rg_VHH19 | | | | |
| hIL10Ra_VHH14 - | GGSGGSGGSG | his | 0 | 7455 |
| hIL2Rg_VHH19 | | | | |
| hIL10Ra_VHH14 - | GGSGGSGGSG | his | 0 (LPS | 10138 |
| hIL2Rg_VHH19 | | | only) | |
| hIL10Ra_VHH14 - | GGSGGSGGSG | his | 0.0001 | 7366 |
| hIL2Rg_VHH19 | | | | |
| hIL10Ra_VHH14 - | GGSGGSGGSG | his | 0.001 | 7535 |
| hIL2Rg_VHH19 | | | | |
| hIL10Ra_VHH14 - | GGSGGSGGSG | his | 0.01 | 8008 |
| hIL2Rg_VHH19 | | | | |
| hIL10Ra_VHH14 - | GGSGGSGGSG | his | 0.1 | 8891 |
| hIL2Rg_VHH19 | | | | |
| hIL10Ra_VHH14 - | GGSGGSGGSG | his | 1 | 7561 |
| hIL2Rg_VHH19 | | | | |
| hIL10Ra_VHH14 - | GGSGGSGGSG | his | 10 | 8465 |
| hIL2Rg_VHH19 | | | | |
| hIL10Ra_VHH14 - | GGSGGSGGSG | his | 100 | 10573 |
| hIL2Rg_VHH19 | | | | |

TABLE 30
Activity of VHH dimers on LPS treated
Monocyte IL-8 secretion.

| | | | Concen- | |
|---|---|---|---|---|
| | | | tration | |
| | | | of | |
| | | | molecule | IL-8 |
| VHH1 - VHH2 ID | Linker | Tag | (μM) | (pg/mL) |
| hIL10Ra_VHH14 - | GGGS | Fc | 0 | 68763 |
| hIL2Rg_VHH19 | | | | |
| hIL10Ra_VHH14 - | GGGS | Fc | 0 (LPS) | 68829 |
| hIL2Rg_VHH19 | | | only | |
| hIL10Ra_VHH14 - | GGGS | Fc | 0.0001 | 73149 |
| hIL2Rg_VHH19 | | | | |
| hIL10Ra_VHH14 - | GGGS | Fc | 0.001 | 68963 |
| hIL2Rg_VHH19 | | | | |
| hIL10Ra_VHH14 - | GGGS | Fc | 0.01 | 72977 |
| hIL2Rg_VHH19 | | | | |
| hIL10Ra_VHH14 - | GGGS | Fc | 0.1 | 69358 |
| hIL2Rg_VHH19 | | | | |
| hIL10Ra_VHH14 - | GGGS | Fc | 1 | 72648 |
| hIL2Rg_VHH19 | | | | |
| hIL10Ra_VHH14 - | GGGS | Fc | 10 | 68592 |
| hIL2Rg_VHH19 | | | | |
| hIL10Ra_VHH14 - | GGGS | Fc | 100 | 71843 |
| hIL2Rg_VHH19 | | | | |
| hIL10Ra_VHH14 - | GGGS | his | 0 | 68763 |
| hIL2Rg_VHH19 | | | | |
| hIL10Ra_VHH14 - | GGGS | his | 0 (LPS | 68829 |
| hIL2Rg_VHH19 | | | only) | |
| hIL10Ra_VHH14 - | GGGS | his | 0.0001 | 72537 |
| hIL2Rg_VHH19 | | | | |
| hIL10Ra_VHH14 - | GGGS | his | 0.001 | 69567 |
| hIL2Rg_VHH19 | | | | |
| hIL10Ra_VHH14 - | GGGS | his | 0.01 | 71836 |
| hIL2Rg_VHH19 | | | | |
| hIL10Ra_VHH14 - | GGGS | his | 0.1 | 67444 |
| hIL2Rg_VHH19 | | | | |
| hIL10Ra_VHH14 - | GGGS | his | 1 | 71572 |
| hIL2Rg_VHH19 | | | | |
| hIL10Ra_VHH14 - | GGGS | his | 10 | 69052 |
| hIL2Rg_VHH19 | | | | |
| hIL10Ra_VHH14 - | GGGS | his | 100 | 71296 |
| hIL2Rg_VHH19 | | | | |
| hIL10Ra_VHH14 - | No linker | his | 0 | 68763 |
| hIL2Rg_VHH19 | | | | |
| hIL10Ra_VHH14 - | No linker | his | 0 (LPS | 68829 |
| hIL2Rg_VHH19 | | | only) | |
| hIL10Ra_VHH14 - | No linker | his | 0.0001 | 73472 |
| hIL2Rg_VHH19 | | | | |
| hIL10Ra_VHH14 - | No linker | his | 0.001 | 69342 |
| hIL2Rg_VHH19 | | | | |
| hIL10Ra_VHH14 - | No linker | his | 0.01 | 73018 |
| hIL2Rg_VHH19 | | | | |
| hIL10Ra_VHH14 - | No linker | his | 0.1 | 69553 |
| hIL2Rg_VHH19 | | | | |
| hIL10Ra_VHH14 - | No linker | his | 1 | 72874 |
| hIL2Rg_VHH19 | | | | |
| hIL10Ra_VHH14 - | No linker | his | 10 | 69630 |
| hIL2Rg_VHH19 | | | | |
| hIL10Ra_VHH14 - | No linker | his | 100 | 71764 |
| hIL2Rg_VHH19 | | | | |
| hIL10Ra_VHH14 - | GS | his | 0 | 68763 |
| hIL2Rg_VHH19 | | | | |
| hIL10Ra_VHH14 - | GS | his | 0 (LPS | 68829 |
| hIL2Rg_VHH19 | | | only) | |
| hIL10Ra_VHH14 - | GS | his | 0.0001 | 73590 |
| hIL2Rg_VHH19 | | | | |
| hIL10Ra_VHH14 - | GS | his | 0.001 | 69641 |
| hIL2Rg_VHH19 | | | | |
| hIL10Ra_VHH14 - | GS | his | 0.01 | 70913 |
| hIL2Rg_VHH19 | | | | |
| hIL10Ra_VHH14 - | GS | his | 0.1 | 69034 |
| hIL2Rg_VHH19 | | | | |
| hIL10Ra_VHH14 - | GS | his | 1 | 71858 |
| hIL2Rg_VHH19 | | | | |
| hIL10Ra_VHH14 - | GS | his | 10 | 68712 |
| hIL2Rg_VHH19 | | | | |
| hIL10Ra_VHH14 - | GS | his | 100 | 72069 |
| hIL2Rg_VHH19 | | | | |
| hIL10Ra_VHH14 - | GGSGGS | his | 0 | 68763 |
| hIL2Rg_VHH19 | | | | |
| hIL10Ra_VHH14 - | GGSGGS | his | 0 (LPS | 68829 |
| hIL2Rg_VHH19 | | | only) | |
| hIL10Ra_VHH14 - | GGSGGS | his | 0.0001 | 73805 |
| hIL2Rg_VHH19 | | | | |
| hIL10Ra_VHH14 - | GGSGGS | his | 0.001 | 69583 |
| hIL2Rg_VHH19 | | | | |
| hIL10Ra_VHH14 - | GGSGGS | his | 0.01 | 72588 |
| hIL2Rg_VHH19 | | | | |
| hIL10Ra_VHH14 - | GGSGGS | his | 0.1 | 68146 |
| hIL2Rg_VHH19 | | | | |
| hIL10Ra_VHH14 - | GGSGGS | his | 1 | 72922 |
| hIL2Rg_VHH19 | | | | |
| hIL10Ra_VHH14 - | GGSGGS | his | 10 | 69402 |
| hIL2Rg_VHH19 | | | | |
| hIL10Ra_VHH14 - | GGSGGS | his | 100 | 72996 |
| hIL2Rg_VHH19 | | | | |
| hIL10Ra_VHH14 - | GGGSGGGS | his | 0 | 68763 |
| hIL2Rg_VHH19 | | | | |
| hIL10Ra_VHH14 - | GGGSGGGS | his | 0 (LPS | 68829 |
| hIL2Rg_VHH19 | | | only) | |
| hIL10Ra_VHH14 - | GGGSGGGS | his | 0.0001 | 72738 |
| hIL2Rg_VHH19 | | | | |
| hIL10Ra_VHH14 - | GGGSGGGS | his | 0.001 | 69165 |
| hIL2Rg_VHH19 | | | | |
| hIL10Ra_VHH14 - | GGGSGGGS | his | 0.01 | 70771 |
| hIL2Rg_VHH19 | | | | |
| hIL10Ra_VHH14 - | GGGSGGGS | his | 0.1 | 67136 |
| hIL2Rg_VHH19 | | | | |
| hIL10Ra_VHH14 - | GGGSGGGS | his | 1 | 71990 |
| hIL2Rg_VHH19 | | | | |
| hIL10Ra_VHH14 - | GGGSGGGS | his | 10 | 68600 |
| hIL2Rg_VHH19 | | | | |
| hIL10Ra_VHH14 - | GGGSGGGS | his | 100 | 72121 |
| hIL2Rg_VHH19 | | | | |
| hIL10Ra_VHH14 - | GGSGGSGGSG | his | 0 | 68763 |
| hIL2Rg_VHH19 | | | | |
| hIL10Ra_VHH14 - | GGSGGSGGSG | his | 0 (LPS | 68829 |
| hIL2Rg_VHH19 | | | only) | |
| hIL10Ra_VHH14 - | GGSGGSGGSG | his | 0.0001 | 73256 |
| hIL2Rg_VHH19 | | | | |
| hIL10Ra_VHH14 - | GGSGGSGGSG | his | 0.001 | 68734 |
| hIL2Rg_VHH19 | | | | |
| hIL10Ra_VHH14 - | GGSGGSGGSG | his | 0.01 | 73317 |
| hIL2Rg_VHH19 | | | | |
| hIL10Ra_VHH14 - | GGSGGSGGSG | his | 0.1 | 68370 |
| hIL2Rg_VHH19 | | | | |
| hIL10Ra_VHH14 - | GGSGGSGGSG | his | 1 | 72889 |
| hIL2Rg_VHH19 | | | | |
| hIL10Ra_VHH14 - | GGSGGSGGSG | his | 10 | 69439 |
| hIL2Rg_VHH19 | | | | |
| hIL10Ra_VHH14 - | GGSGGSGGSG | his | 100 | 72622 |
| hIL2Rg_VHH19 | | | | |

NUCLEIC ACID SEQUENCES

>SEQ ID NO: 83; DR392(DR229-DR236)
CAAGTGCAGCTGCAAGAGAGCGGAGGAGGACTGGTCCAGCCCGGCGGCTCTCTG
AGGCTGAGCTGCACTGCTTCCGGCTTCAGCTTCAGCAGCTACCCTATGACATGGG
CTAGGCAAGCCCCCGGCAAAGGACTGGAATGGGTGAGCACTATTGCCAGCGATG
GAGGCAGCACAGCCTACGCTGCCAGCGTGGAGGGAAGGTTCACAATCTCTAGGG
ACAATGCCAAGAGCACACTGTATCTGCAGCTGAACTCTCTGAAGACAGAGGACA
CTGCCATGTACTACTGCACTAAGGGCTACGGCGATGGCACACCAGCTCCCGGCC
AAGGCACACAAGTGACTGTCTCGAGCGGCGGAGGATCCCAAGTGCAGCTGCAAG
AGAGCGGAGGAGGAAGCGTGCAAGCCGGAGGCTCTCTGAGGCTGAGCTGTGCCG
CCTCTAGGTTCACATACAGCAGCTACTGCATGGGCTGGTTCAGACAAGCCCCCGG
CAAAGAGAGAGAAGGCGTGGCCAGCATCGATAGCGATGGCTCCACTAGCTACAC
TGACAGCGTGAAGGGAAGGTTCACTATCAGCAAGGACAACGCCAAGAACACTCT
GTATCTGCAGATGAACTCTCTGAAGCCAGAGGACACAGCCATGTACTACTGTGCC
CTCGATCTGATGAGCACAGTGGTGCCCGGCTTCTGTGGCTTTCTGCTGAGCGCTG
GCATGGATTACTGGGGCAAGGGCACTCAAGTGACTGTCTCGTCTGCTAGCCACCA
TCACCATCACCAC
>SEQ ID NO: 84; DR395(DR229-DR239)
CAAGTGCAGCTGCAAGAGAGCGGAGGAGGACTGGTCCAGCCCGGCGGCTCTCTG
AGGCTGAGCTGCACTGCTTCCGGCTTCAGCTTCAGCAGCTACCCTATGACATGGG
CTAGGCAAGCCCCCGGCAAAGGACTGGAATGGGTGAGCACTATTGCCAGCGATG
GAGGCAGCACAGCCTACGCTGCCAGCGTGGAGGGAAGGTTCACAATCTCTAGGG
ACAATGCCAAGAGCACACTGTATCTGCAGCTGAACTCTCTGAAGACAGAGGACA
CTGCCATGTACTACTGCACTAAGGGCTACGGCGATGGCACACCAGCTCCCGGCC
AAGGCACACAAGTGACTGTCTCGAGCGGCGGAGGATCCCAAGTGCAGCTGCAAG
AGAGCGGAGGAGGAAGCGTGCAAGCCGGAGGCTCTCTGAGGCTGAGCTGTACA
GTGTCCGGCTACACTTACAGCTCCAATTGCATGGGCTGGTTTAGGCAAGCCCCCG
GCAAGGAAAGAGAGGGCGTGGCCACTATCTACACTGGCGGCGGCAACACATACT
ACGCCGATAGCGTGAAGGGAAGGTTCACTATCAGCCAAGATAACGCCAAGAACA
CAGTGTATCTGCAGATGAACAATCTGAAGCCAGAGGACACTGCCATGTACTACT
GTGCTGCTGAGCCACTGTCTAGGGTGTACGGCGGCAGCTGCCCAACTCCTACATT
CGACTACTGGGGCCAAGGCACACAAGTGACTGTCTCGTCTGCTAGCCACCATCAC
CATCACCAC
>SEQ ID NO: 85; DR437(DR235-DR233)
CAAGTGCAGCTGCAAGAGAGCGGAGGAGGAAGCGTGCAAGCCGGAGGCTCTCT
GAGACTGAGCTGTGCCGCCTCTAGGTATCTGTACAGCATCGACTACATGGCTTGG
TTCAGACAGAGCCCCGGCAAGGAGAGGGAGCCAGTGGCTGTCATCTACACTGCC
TCCGGCGCCACATTCTATCCAGATAGCGTGAAGGGAAGGTTCACTATCAGCCAA
GATAACGCCAAGATGACAGTGTATCTGCAGATGAACTCTCTGAAGAGCGAGGAC
ACTGCCATGTACTACTGTGCCGCCGTGAGGAAGACAGATAGCTACCTCTTCGACG
CCCAGAGCTTCACATACTGGGGCCAAGGCACACAAGTGACAGTCTCGAGCGGCG
GAGGATCCCAAGTGCAGCTGCAAGAGAGCGGAGGCGGAAGCGTGCAAGCTGGA
GGATCTCTGAGGCTGAGCTGCACAGCCAGCGGCTTCACTTTCGATGACAGCGAC
ATGGGCTGGTATAGGCAAGCCCCCGGCAATGAGTGTGAGCTGGTGAGCACAATC
AGCAGCGACGGCTCCACTTACTACGCCGACAGCGTCAAGGGAAGGTTCACAATC
AGCCAAGATAACGCCAAGAACACTGTGTATCTGCAGATGAACTCTCTGAAGCCA
GAGGACACAGCCGTGTACTACTGTGCTGCCGAGCCTAGGGGCTACTATAGCAAC
TACGGCGGAAGGAGGGAGTGCAATTACTGGGGCCAAGGCACACAAGTGACAGT
CTCGTCTGCTAGCCACCATCACCATCACCAC
>SEQ ID NO: 86; DR438(DR235-DR234)
CAAGTGCAGCTGCAAGAGAGCGGAGGAGGAAGCGTGCAAGCCGGAGGCTCTCT
GAGACTGAGCTGTGCCGCCTCTAGGTATCTGTACAGCATCGACTACATGGCTTGG
TTCAGACAGAGCCCCGGCAAGGAGAGGGAGCCAGTGGCTGTCATCTACACTGCC
TCCGGCGCCACATTCTATCCAGATAGCGTGAAGGGAAGGTTCACTATCAGCCAA
GATAACGCCAAGATGACAGTGTATCTGCAGATGAACTCTCTGAAGAGCGAGGAC
ACTGCCATGTACTACTGTGCCGCCGTGAGGAAGACAGATAGCTACCTCTTCGACG
CCCAGAGCTTCACATACTGGGGCCAAGGCACACAAGTGACAGTCTCGAGCGGCG
GAGGATCCCAAGTGCAGCTGCAAGAGAGCGGAGGAGGAAGCGTGCAAGCCGGA
GGCTCTCTGAGGCTGAGCTGTGTGGCTAGTGGCTACACTTTCAGCAGCTACTGCA
TGGGCTGGTTCAGACAAGCCCCCGGCAAGGAAAGGGAAGGAGTGGCCGCTCTGG
GCGGAGGAAGCACATACTACGCTGACAGCGTGAAGGGAAGGTTCACAATCAGCC
AAGATAACGCCAAGAACACACTGTATCTGCAGATGAACTCTCTGAAGCCAGAGG
ACACAGCCATGTACTACTGTGCCGCTGCTTGGGTCGCTTGTCTGGAGTTCGGCGG
CAGCTGGTACGATCTGGCTAGGTACAAGCACTGGGGCCAAGGCACACAAGTGAC
AGTCTCGTCTGCTAGCCACCATCACCATCACCAC
>SEQ ID NO: 87; DR441(DR236-DR231)
CAAGTGCAGCTGCAAGAGAGCGGAGGAGGAAGCGTGCAAGCCGGAGGCTCTCT
GAGGCTGAGCTGTGCCGCCTCTAGGTTCACATACAGCAGCTACTGCATGGGCTGG
TTCAGACAAGCCCCCGGCAAAGAGAGAGAAGGCGTGGCCAGCATCGATAGCGAT
GGCTCCACTAGCTACACTGACAGCGTGAAGGGAAGGTTCACTATCAGCAAGGAC
AACGCCAAGAACACTCTGTATCTGCAGATGAACTCTCTGAAGCCAGAGGACACA
GCCATGTACTACTGTGCCCTCGATCTGATGAGCACAGTGGTGCCCGGCTTCTGTG
GCTTTCTGCTGAGCGCTGGCATGGATTACTGGGGCAAGGGCACTCAAGTGACTGT
CTCGAGCGGCGGAGGATCCCAAGTGCAGCTGCAAGAGAGCGGAGGAGGAAGCG
TGCAAGCCGGCGGATCTCTGAGACTCAGCTGTACTGCCTCCGGCTTCACATTCGA
CGATAGGGAGATGAACTGGTATAGGCAAGCCCCCGGCAATGAGTGCGAGCTGGT
GAGCACAATCTCCAGCGATGGCAGCACTTACTACGCCGATAGCGTGAAGGGAAG
GTTCACTATCTCCCAAGATAACGCCAAGAACACAGTCTATCTGCAGATGGACTCC
GTCAAGCCAGAGGATACTGCCGTGTACTACTGCGCCGCCGACTTCATGATCGCCA
TCCAAGCCCCCGGCGCTGGCTGTTGGGGACAAGGCACTCAAGTGACAGTCTCGT
CTGCTAGCCACCATCACCATCACCAC
>SEQ ID NO: 88; DR442(DR236-DR232)
CAAGTGCAGCTGCAAGAGAGCGGAGGAGGAAGCGTGCAAGCCGGAGGCTCTCT
GAGGCTGAGCTGTGCCGCCTCTAGGTTCACATACAGCAGCTACTGCATGGGCTGG
TTCAGACAAGCCCCCGGCAAAGAGAGAGAAGGCGTGGCCAGCATCGATAGCGAT
GGCTCCACTAGCTACACTGACAGCGTGAAGGGAAGGTTCACTATCAGCAAGGAC
AACGCCAAGAACACTCTGTATCTGCAGATGAACTCTCTGAAGCCAGAGGACACA
GCCATGTACTACTGTGCCCTCGATCTGATGAGCACAGTGGTGCCCGGCTTCTGTG
GCTTTCTGCTGAGCGCTGGCATGGATTACTGGGGCAAGGGCACTCAAGTGACTGT
CTCGAGCGGCGGAGGATCCCAAGTGCAGCTGCAAGAGAGCGGAGGAGGCAGCG
TGCAAGCCGGAGGCTCTCTGAGACTGAGCTGTGTGGCTAGTGGCTACACAAGCT
GCATGGGCTGGTTTAGGCAAGCCCCCGGCAAGGAGAGAGAGGCCGTGGCCACAA
TCTACACTAGGGGAAGGAGCATCTACTACGCCGACAGCGTGAAAGGAAGGTTCA
CAATCAGCCAAGATAACGCCAAGAACACTCTGTATCTGCAGATGAACAGCCTCA
AGCCAGAGGACATCGCCATGTATAGCTGTGCTGCTGGCGGCTATAGCTGGAGCG
CTGGCTGCGAGTTCAATTACTGGGGCCAAGGCACACAAGTGACTGTCTCGTCTGC
TAGCCACCATCACCATCACCAC
>SEQ ID NO: 89; DR444(DR236-DR234)
CAAGTGCAGCTGCAAGAGAGCGGAGGAGGAAGCGTGCAAGCCGGAGGCTCTCT
GAGGCTGAGCTGTGCCGCCTCTAGGTTCACATACAGCAGCTACTGCATGGGCTGG
TTCAGACAAGCCCCCGGCAAAGAGAGAGAAGGCGTGGCCAGCATCGATAGCGAT
GGCTCCACTAGCTACACTGACAGCGTGAAGGGAAGGTTCACTATCAGCAAGGAC
AACGCCAAGAACACTCTGTATCTGCAGATGAACTCTCTGAAGCCAGAGGACACA
GCCATGTACTACTGTGCCCTCGATCTGATGAGCACAGTGGTGCCCGGCTTCTGTG
GCTTTCTGCTGAGCGCTGGCATGGATTACTGGGGCAAGGGCACTCAAGTGACTGT
CTCGAGCGGCGGAGGATCCCAAGTGCAGCTGCAAGAGAGCGGAGGAGGAAGCG
TGCAAGCCGGAGGCTCTCTGAGGCTGAGCTGTGTGGCTAGTGGCTACACTTTCAG
CAGCTACTGCATGGGCTGGTTCAGACAAGCCCCCGGCAAGGAAAGGGAAGGAGT
GGCCGCTCTGGGCGGAGGAAGCACATACTACGCTGACAGCGTGAAGGGAAGGTT
CACAATCAGCCAAGATAACGCCAAGAACACACTGTATCTGCAGATGAACTCTCT
GAAGCCAGAGGACACAGCCATGTACTACTGTGCCGCTGCTTGGGTCGCTTGTCTG
GAGTTCGGCGGCAGCTGGTACGATCTGGCTAGGTACAAGCACTGGGGCCAAGGC
ACACAAGTGACAGTCTCGTCTGCTAGCCACCATCACCATCACCAC
>SEQ ID NO: 90; DR449(DR237-DR233)
CAAGTGCAGCTGCAAGAGTCCGGAGGAGGCAGCGTCCAAGCCGGAGGCTCTCTG
AGGCTGAGCTGTGCTGCCAGCGGCTACACTTACAGCATGTACTGCATGGGCTGGT
TCAGACAAGCCCCCGGCAAGGAAAGAGAGGGCGTGGCCCAGATCAATAGCGAT
GGCAGCACAAGCTACGCCGACAGCGTGAAGGGAAGGTTCACTATCTCCAAGGAC
AACGCCAAGAACACTCTGTATCTGCAGATGAACTCTCTGAAGCCAGAGGACACT
GCCATGTACTACTGCGCTGCCGATTCTAGGGTGTACGGCGGCAGCTGGTATGAGA
GGCTCTGCGGCCCTTACACATACGAGTACAACTACTGGGGCCAAGGCACACAAG
TGACTGTCTCGAGCGGCGGAGGATCCCAAGTGCAGCTGCAAGAGAGCGGAGGCG
GAAGCGTGCAAGCTGGAGGATCTCTGAGGCTGAGCTGCACAGCCAGCGGCTTCA
CTTTCGATGACAGCGACATGGGCTGGTATAGGCAAGCCCCCGGCAATGAGTGTG
AGCTGGTGAGCACAATCAGCAGCGACGGCTCCACTTACTACGCCGACAGCGTCA
AGGGAAGGTTCACAATCAGCCAAGATAACGCCAAGAACACTGTGTATCTGCAGA
TGAACTCTCTGAAGCCAGAGGACACAGCCGTGTACTACTGTGCTGCCGAGCCTA
GGGGCTACTATAGCAACTACGGCGGAAGGAGGGAGTGCAATTACTGGGGCCAAG
GCACACAAGTGACAGTCTCGTCTGCTAGCCACCATCACCATCACCAC
>SEQ ID NO: 91; DR465(DR240-DR231)
CAAGTGCAGCTGCAAGAGAGCGGAGGAGGAAGCGTCCAAGCCGGAGGCTCTCT
GAGGCTGAGCTGTGGAGCCAGCGGCTACACTTACAGCAGCTACTGTATGGGCTG
GTTTAGGCAAGTGCCCGGCAAGGAGAGAGAGGGCGTGGCCGTGATCGATTCCGA
TGGCAGCACAAGCTACGCTGACAGCGTGAAGGGAAGGTTCACAATCAGCAAGGA
CAACGGCAAGAACACACTCTATCTGCAGATGAACAGCCTCAAGCCAGAGGACAC
AGCCATGTACTACTGCGCCGCTGATCTGGGCCACTATAGGCCTCCTTGTGGCGTG
CTGTATCTGGGCATGGATTACTGGGGCAAGGGCACACAAGTGACAGTCTCGAGC
GGCGGAGGATCCCAAGTGCAGCTGCAAGAGAGCGGAGGAGGAAGCGTGCAAGC
CGGCGGATCTCTGAGACTCAGCTGTACTGCCTCCGGCTTCACATTCGACGATAGG
GAGATGAACTGGTATAGGCAAGCCCCCGGCAATGAGTGCGAGCTGGTGAGCACA
ATCTCCAGCGATGGCAGCACTTACTACGCCGATAGCGTGAAGGGAAGGTTCACT
ATCTCCCAAGATAACGCCAAGAACACAGTCTATCTGCAGATGGACTCCGTCAAG
CCAGAGGATACTGCCGTGTACTACTGCGCCGCCGACTTCATGATCGCCATCCAAG
CCCCCGGCGCTGGCTGTTGGGGACAAGGCACTCAAGTGACAGTCTCGTCTGCTAG
CCACCATCACCATCACCAC
>SEQ ID NO: 92; DR466(DR240-DR232)
CAAGTGCAGCTGCAAGAGAGCGGAGGAGGAAGCGTCCAAGCCGGAGGCTCTCT
GAGGCTGAGCTGTGGAGCCAGCGGCTACACTTACAGCAGCTACTGTATGGGCTG
GTTTAGGCAAGTGCCCGGCAAGGAGAGAGAGGGCGTGGCCGTGATCGATTCCGA
TGGCAGCACAAGCTACGCTGACAGCGTGAAGGGAAGGTTCACAATCAGCAAGGA
CAACGGCAAGAACACACTCTATCTGCAGATGAACAGCCTCAAGCCAGAGGACAC
AGCCATGTACTACTGCGCCGCTGATCTGGGCCACTATAGGCCTCCTTGTGGCGTG
CTGTATCTGGGCATGGATTACTGGGGCAAGGGCACACAAGTGACAGTCTCGAGC
GGCGGAGGATCCCAAGTGCAGCTGCAAGAGAGCGGAGGAGGCAGCGTGCAAGC
CGGAGGCTCTCTGAGACTGAGCTGTGTGGCTAGTGGCTACACAAGCTGCATGGG
CTGGTTTAGGCAAGCCCCCGGCAAGGAGAGAGAGGCCGTGGCCACAATCTACAC
TAGGGGAAGGAGCATCTACTACGCCGACAGCGTGAAAGGAAGGTTCACAATCAG
CCAAGATAACGCCAAGAACACTCTGTATCTGCAGATGAACAGCCTCAAGCCAGA
GGACATCGCCATGTATAGCTGTGCTGCTGGCGGCTATAGCTGGAGCGCTGGCTGC
GAGTTCAATTACTGGGGCCAAGGCACACAAGTGACTGTCTCGTCTGCTAGCCACC
ATCACCATCACCAC
>SEQ ID NO: 93; DR468(DR240-DR234)
CAAGTGCAGCTGCAAGAGAGCGGAGGAGGAAGCGTCCAAGCCGGAGGCTCTCT
GAGGCTGAGCTGTGGAGCCAGCGGCTACACTTACAGCAGCTACTGTATGGGCTG
GTTTAGGCAAGTGCCCGGCAAGGAGAGAGAGGGCGTGGCCGTGATCGATTCCGA
TGGCAGCACAAGCTACGCTGACAGCGTGAAGGGAAGGTTCACAATCAGCAAGGA
CAACGGCAAGAACACACTCTATCTGCAGATGAACAGCCTCAAGCCAGAGGACAC
AGCCATGTACTACTGCGCCGCTGATCTGGGCCACTATAGGCCTCCTTGTGGCGTG
CTGTATCTGGGCATGGATTACTGGGGCAAGGGCACACAAGTGACAGTCTCGAGC
GGCGGAGGATCCCAAGTGCAGCTGCAAGAGAGCGGAGGAGGAAGCGTGCAAGC
CGGAGGCTCTCTGAGGCTGAGCTGTGTGGCTAGTGGCTACACTTTCAGCAGCTAC
TGCATGGGCTGGTTCAGACAAGCCCCCGGCAAGGAAAGGGAAGGAGTGGCCGCT
CTGGGCGGAGGAAGCACATACTACGCTGACAGCGTGAAGGGAAGGTTCACAATC
AGCCAAGATAACGCCAAGAACACACTGTATCTGCAGATGAACTCTCTGAAGCCA
GAGGACACAGCCATGTACTACTGTGCCGCTGCTTGGGTCGCTTGTCTGGAGTTCG
GCGGCAGCTGGTACGATCTGGCTAGGTACAAGCACTGGGGCCAAGGCACACAAG
TGACAGTCTCGTCTGCTAGCCACCATCACCATCACCAC
>SEQ ID NO: 94; DR471(DR241-DR231)
CAAGTGCAGCTGCAAGAGAGCGGAGGAGGAAGCGTCCAAGCCGGAGGCTCTCT
GAGACTGAGCTGTGCCGCCAGCGGCTACTCCAACTGCAGCTACGACATGACTTG
GTATAGGCAAGCCCCCGGCAAGGAGAGGGAGTTCGTGTCCGCCATCCACAGCGA
CGGCAGCACTAGATACGCCGACAGCGTGAAGGGAAGGTTCTTCATCAGCCAAGA
TAACGCCAAGAACACAGTGTATCTGCAGATGAACTCCCTCAAGCCAGAGGACAC
TGCCATGTACTACTGCAAGACAGACCCACTGCACTGCAGAGCCCATGGCGGCAG
CTGGTATAGCGTGAGGGCCAACTACTGGGGCCAAGGCACACAAGTGACAGTCTC
GAGCGGCGGAGGATCCCAAGTGCAGCTGCAAGAGAGCGGAGGAGGAAGCGTGC
AAGCCGGCGGATCTCTGAGACTCAGCTGTACTGCCTCCGGCTTCACATTCGACGA
TAGGGAGATGAACTGGTATAGGCAAGCCCCCGGCAATGAGTGCGAGCTGGTGAG
CACAATCTCCAGCGATGGCAGCACTTACTACGCCGATAGCGTGAAGGGAAGGTT
CACTATCTCCCAAGATAACGCCAAGAACACAGTCTATCTGCAGATGGACTCCGTC
AAGCCAGAGGATACTGCCGTGTACTACTGCGCCGCCGACTTCATGATCGCCATCC
AAGCCCCCGGCGCTGGCTGTTGGGGACAAGGCACTCAAGTGACAGTCTCGTCTG
CTAGCCACCATCACCATCACCAC
>SEQ ID NO: 95; DR474(DR241-DR234)
CAAGTGCAGCTGCAAGAGAGCGGAGGAGGAAGCGTCCAAGCCGGAGGCTCTCT
GAGACTGAGCTGTGCCGCCAGCGGCTACTCCAACTGCAGCTACGACATGACTTG
GTATAGGCAAGCCCCCGGCAAGGAGAGGGAGTTCGTGTCCGCCATCCACAGCGA
CGGCAGCACTAGATACGCCGACAGCGTGAAGGGAAGGTTCTTCATCAGCCAAGA
TAACGCCAAGAACACAGTGTATCTGCAGATGAACTCCCTCAAGCCAGAGGACAC
TGCCATGTACTACTGCAAGACAGACCCACTGCACTGCAGAGCCCATGGCGGCAG
CTGGTATAGCGTGAGGGCCAACTACTGGGGCCAAGGCACACAAGTGACAGTCTC
GAGCGGCGGAGGATCCCAAGTGCAGCTGCAAGAGAGCGGAGGAGGAAGCGTGC
AAGCCGGAGGCTCTCTGAGGCTGAGCTGTGTGGCTAGTGGCTACACTTTCAGCAG
CTACTGCATGGGCTGGTTCAGACAAGCCCCCGGCAAGGAAAGGGAAGGAGTGGC
CGCTCTGGGCGGAGGAAGCACATACTACGCTGACAGCGTGAAGGGAAGGTTCAC
AATCAGCCAAGATAACGCCAAGAACACACTGTATCTGCAGATGAACTCTCTGAA
GCCAGAGGACACAGCCATGTACTACTGTGCCGCTGCTTGGGTCGCTTGTCTGGAG
TTCGGCGGCAGCTGGTACGATCTGGCTAGGTACAAGCACTGGGGCCAAGGCACA
CAAGTGACAGTCTCGTCTGCTAGCCACCATCACCATCACCAC
>SEQ ID NO: 180; DR391(DR229-DR235)
CAAGTGCAGCTGCAAGAGAGCGGAGGAGGACTGGTCCAGCCCGGCGGCTCTCTG
AGGCTGAGCTGCACTGCTTCCGGCTTCAGCTTCAGCAGCTACCCTATGACATGGG
CTAGGCAAGCCCCCGGCAAAGGACTGGAATGGGTGAGCACTATTGCCAGCGATG
GAGGCAGCACAGCCTACGCTGCCAGCGTGGAGGGAAGGTTCACAATCTCTAGGG
ACAATGCCAAGAGCACACTGTATCTGCAGCTGAACTCTCTGAAGACAGAGGACA
CTGCCATGTACTACTGCACTAAGGGCTACGGCGATGGCACACCAGCTCCCGGCC
AAGGCACACAAGTGACTGTCTCGAGCGGCGGAGGATCCCAAGTGCAGCTGCAAG
AGAGCGGAGGAGGAAGCGTGCAAGCCGGAGGCTCTCTGAGACTGAGCTGTGCCG
CCTCTAGGTATCTGTACAGCATCGACTACATGGCTTGGTTCAGACAGAGCCCCGG
CAAGGAGAGGGAGCCAGTGGCTGTCATCTACACTGCCTCCGGCGCCACATTCTAT
CCAGATAGCGTGAAGGGAAGGTTCACTATCAGCCAAGATAACGCCAAGATGACA
GTGTATCTGCAGATGAACTCTCTGAAGAGCGAGGACACTGCCATGTACTACTGTG
CCGCCGTGAGGAAGACAGATAGCTACCTCTTCGACGCCCAGAGCTTCACATACT
GGGGCCAAGGCACACAAGTGACAGTCTCGTCTGCTAGCCACCATCACCATCACC
AC
>SEQ ID NO: 181; DR392(DR229-DR236)
CAAGTGCAGCTGCAAGAGAGCGGAGGAGGACTGGTCCAGCCCGGCGGCTCTCTG
AGGCTGAGCTGCACTGCTTCCGGCTTCAGCTTCAGCAGCTACCCTATGACATGGG
CTAGGCAAGCCCCCGGCAAAGGACTGGAATGGGTGAGCACTATTGCCAGCGATG
GAGGCAGCACAGCCTACGCTGCCAGCGTGGAGGGAAGGTTCACAATCTCTAGGG
ACAATGCCAAGAGCACACTGTATCTGCAGCTGAACTCTCTGAAGACAGAGGACA
CTGCCATGTACTACTGCACTAAGGGCTACGGCGATGGCACACCAGCTCCCGGCC
AAGGCACACAAGTGACTGTCTCGAGCGGCGGAGGATCCCAAGTGCAGCTGCAAG
AGAGCGGAGGAGGAAGCGTGCAAGCCGGAGGCTCTCTGAGGCTGAGCTGTGCCG
CCTCTAGGTTCACATACAGCAGCTACTGCATGGGCTGGTTCAGACAAGCCCCCGG
CAAAGAGAGAGAAGGCGTGGCCAGCATCGATAGCGATGGCTCCACTAGCTACAC
TGACAGCGTGAAGGGAAGGTTCACTATCAGCAAGGACAACGCCAAGAACACTCT
GTATCTGCAGATGAACTCTCTGAAGCCAGAGGACACAGCCATGTACTACTGTGCC
CTCGATCTGATGAGCACAGTGGTGCCCGGCTTCTGTGGCTTTCTGCTGAGCGCTG
GCATGGATTACTGGGGCAAGGGCACTCAAGTGACTGTCTCGTCTGCTAGCCACCA
TCACCATCACCAC
>SEQ ID NO: 182; DR393(DR229-DR237)
CAAGTGCAGCTGCAAGAGAGCGGAGGAGGACTGGTCCAGCCCGGCGGCTCTCTG
AGGCTGAGCTGCACTGCTTCCGGCTTCAGCTTCAGCAGCTACCCTATGACATGGG
CTAGGCAAGCCCCCGGCAAAGGACTGGAATGGGTGAGCACTATTGCCAGCGATG
GAGGCAGCACAGCCTACGCTGCCAGCGTGGAGGGAAGGTTCACAATCTCTAGGG
ACAATGCCAAGAGCACACTGTATCTGCAGCTGAACTCTCTGAAGACAGAGGACA
CTGCCATGTACTACTGCACTAAGGGCTACGGCGATGGCACACCAGCTCCCGGCC
AAGGCACACAAGTGACTGTCTCGAGCGGCGGAGGATCCCAAGTGCAGCTGCAAG
AGTCCGGAGGAGGCAGCGTCCAAGCCGGAGGCTCTCTGAGGCTGAGCTGTGCTG
CCAGCGGCTACACTTACAGCATGTACTGCATGGGCTGGTTCAGACAAGCCCCCG
GCAAGGAAAGAGAGGGCGTGGCCCAGATCAATAGCGATGGCAGCACAAGCTAC
GCCGACAGCGTGAAGGGAAGGTTCACTATCTCCAAGGACAACGCCAAGAACACT
CTGTATCTGCAGATGAACTCTCTGAAGCCAGAGGACACTGCCATGTACTACTGCG
CTGCCGATTCTAGGGTGTACGGCGGCAGCTGGTATGAGAGGCTCTGCGGCCCTTA
CACATACGAGTACAACTACTGGGGCCAAGGCACACAAGTGACTGTCTCGTCTGC
TAGCCACCATCACCATCACCAC
>SEQ ID NO: 183; DR394(DR229-DR238)
CAAGTGCAGCTGCAAGAGAGCGGAGGAGGACTGGTCCAGCCCGGCGGCTCTCTG
AGGCTGAGCTGCACTGCTTCCGGCTTCAGCTTCAGCAGCTACCCTATGACATGGG
CTAGGCAAGCCCCCGGCAAAGGACTGGAATGGGTGAGCACTATTGCCAGCGATG
GAGGCAGCACAGCCTACGCTGCCAGCGTGGAGGGAAGGTTCACAATCTCTAGGG
ACAATGCCAAGAGCACACTGTATCTGCAGCTGAACTCTCTGAAGACAGAGGACA
CTGCCATGTACTACTGCACTAAGGGCTACGGCGATGGCACACCAGCTCCCGGCC
AAGGCACACAAGTGACTGTCTCGAGCGGCGGAGGATCCCAAGTGCAGCTGCAAG
AGAGCGGCGGAGGAAGCGTGCAAGCCGGAGGATCTCTGAGACTGAGCTGCGCTG
TGAGCGGCTACGCCTACTCCACATACTGCATGGGCTGGTTTAGGCAAGCCCCCGG
CAAAGAGAGAGAGGGCGTGGCTGCTATCGATAGCGGCGGCAGCACAAGCTACG
CCGATAGCGTGAAGGGAAGGTTCACAATCAGCAAGGACAACGCCAAGAACACA
CTGTATCTGAGGATGAACTCTCTGAAGCCAGAGGACACAGCCATGTACTACTGTG
CTGCTGTGCCTCCTCCTCCAGATGGCGGCAGCTGTCTGTTTCTGGGACCAGAGAT
CAAGGTCAGCAAGGCCGATTTTAGGTACTGGGGCCAAGGCACACAAGTGACAGT
CTCGTCTGCTAGCCACCATCACCATCACCAC
>SEQ ID NO: 184; DR395(DR229-DR239)
CAAGTGCAGCTGCAAGAGAGCGGAGGAGGACTGGTCCAGCCCGGCGGCTCTCTG
AGGCTGAGCTGCACTGCTTCCGGCTTCAGCTTCAGCAGCTACCCTATGACATGGG
CTAGGCAAGCCCCCGGCAAAGGACTGGAATGGGTGAGCACTATTGCCAGCGATG
GAGGCAGCACAGCCTACGCTGCCAGCGTGGAGGGAAGGTTCACAATCTCTAGGG
ACAATGCCAAGAGCACACTGTATCTGCAGCTGAACTCTCTGAAGACAGAGGACA
CTGCCATGTACTACTGCACTAAGGGCTACGGCGATGGCACACCAGCTCCCGGCC
AAGGCACACAAGTGACTGTCTCGAGCGGCGGAGGATCCCAAGTGCAGCTGCAAG
AGAGCGGAGGAGGAAGCGTGCAAGCCGGAGGCTCTCTGAGGCTGAGCTGTACA
GTGTCCGGCTACACTTACAGCTCCAATTGCATGGGCTGGTTTAGGCAAGCCCCCG
GCAAGGAAAGAGAGGGCGTGGCCACTATCTACACTGGCGGCGGCAACACATACT
ACGCCGATAGCGTGAAGGGAAGGTTCACTATCAGCCAAGATAACGCCAAGAACA
CAGTGTATCTGCAGATGAACAATCTGAAGCCAGAGGACACTGCCATGTACTACT
GTGCTGCTGAGCCACTGTCTAGGGTGTACGGCGGCAGCTGCCCAACTCCTACATT
CGACTACTGGGGCCAAGGCACACAAGTGACTGTCTCGTCTGCTAGCCACCATCAC
CATCACCAC
>SEQ ID NO: 185; DR396(DR229-DR240)
CAAGTGCAGCTGCAAGAGAGCGGAGGAGGACTGGTCCAGCCCGGCGGCTCTCTG
AGGCTGAGCTGCACTGCTTCCGGCTTCAGCTTCAGCAGCTACCCTATGACATGGG
CTAGGCAAGCCCCCGGCAAAGGACTGGAATGGGTGAGCACTATTGCCAGCGATG
GAGGCAGCACAGCCTACGCTGCCAGCGTGGAGGGAAGGTTCACAATCTCTAGGG
ACAATGCCAAGAGCACACTGTATCTGCAGCTGAACTCTCTGAAGACAGAGGACA
CTGCCATGTACTACTGCACTAAGGGCTACGGCGATGGCACACCAGCTCCCGGCC
AAGGCACACAAGTGACTGTCTCGAGCGGCGGAGGATCCCAAGTGCAGCTGCAAG
AGAGCGGAGGAGGAAGCGTCCAAGCCGGAGGCTCTCTGAGGCTGAGCTGTGGA
GCCAGCGGCTACACTTACAGCAGCTACTGTATGGGCTGGTTTAGGCAAGTGCCCG
GCAAGGAGAGAGAGGGCGTGGCCGTGATCGATTCCGATGGCAGCACAAGCTACG
CTGACAGCGTGAAGGGAAGGTTCACAATCAGCAAGGACAACGGCAAGAACACA
CTCTATCTGCAGATGAACAGCCTCAAGCCAGAGGACACAGCCATGTACTACTGC
GCCGCTGATCTGGGCCACTATAGGCCTCCTTGTGGCGTGCTGTATCTGGGCATGG
ATTACTGGGGCAAGGGCACACAAGTGACAGTCTCGTCTGCTAGCCACCATCACC
ATCACCAC
>SEQ ID NO: 186; DR397(DR229-DR241)
CAAGTGCAGCTGCAAGAGAGCGGAGGAGGACTGGTCCAGCCCGGCGGCTCTCTG
AGGCTGAGCTGCACTGCTTCCGGCTTCAGCTTCAGCAGCTACCCTATGACATGGG
CTAGGCAAGCCCCCGGCAAAGGACTGGAATGGGTGAGCACTATTGCCAGCGATG
GAGGCAGCACAGCCTACGCTGCCAGCGTGGAGGGAAGGTTCACAATCTCTAGGG
ACAATGCCAAGAGCACACTGTATCTGCAGCTGAACTCTCTGAAGACAGAGGACA
CTGCCATGTACTACTGCACTAAGGGCTACGGCGATGGCACACCAGCTCCCGGCC
AAGGCACACAAGTGACTGTCTCGAGCGGCGGAGGATCCCAAGTGCAGCTGCAAG
AGAGCGGAGGAGGAAGCGTCCAAGCCGGAGGCTCTCTGAGACTGAGCTGTGCCG
CCAGCGGCTACTCCAACTGCAGCTACGACATGACTTGGTATAGGCAAGCCCCCG
GCAAGGAGAGGGAGTTCGTGTCCGCCATCCACAGCGACGGCAGCACTAGATACG
CCGACAGCGTGAAGGGAAGGTTCTTCATCAGCCAAGATAACGCCAAGAACACAG
TGTATCTGCAGATGAACTCCCTCAAGCCAGAGGACACTGCCATGTACTACTGCAA
GACAGACCCACTGCACTGCAGAGCCCATGGCGGCAGCTGGTATAGCGTGAGGGC
CAACTACTGGGGCCAAGGCACACAAGTGACAGTCTCGTCTGCTAGCCACCATCA
CCATCACCAC
>SEQ ID NO: 187; DR398(DR230-DR235)
CAAGTGCAGCTGCAAGAGAGCGGAGGAGGACTGGTGCAGCCCGGCGGCTCTCTG
AGGCTGAGCTGTGCTGCCAGCGGCTTCACTTTCAGCAGCGCTCACATGAGCTGGG
TGAGGCAAGCCCCCGGCAAAGGAAGGGAGTGGATCGCCTCCATCTACAGCGGCG
GCGGAACATTCTACGCCGACAGCGTGAAGGGAAGGTTCACAATCTCTAGGGACA
ACGCCAAGAACACACTGTATCTGCAGCTGAACTCTCTGAAGGCCGAGGACACTG
CCATGTACTACTGCGCCACTAATAGGCTGCACTACTACAGCGACGATGATTCTCT
GAGGGGCCAAGGCACACAAGTGACAGTCTCGAGCGGCGGAGGATCCCAAGTGC
AGCTGCAAGAGAGCGGAGGAGGAAGCGTGCAAGCCGGAGGCTCTCTGAGACTG
AGCTGTGCCGCCTCTAGGTATCTGTACAGCATCGACTACATGGCTTGGTTCAGAC
AGAGCCCCGGCAAGGAGAGGGAGCCAGTGGCTGTCATCTACACTGCCTCCGGCG
CCACATTCTATCCAGATAGCGTGAAGGGAAGGTTCACTATCAGCCAAGATAACG
CCAAGATGACAGTGTATCTGCAGATGAACTCTCTGAAGAGCGAGGACACTGCCA
TGTACTACTGTGCCGCCGTGAGGAAGACAGATAGCTACCTCTTCGACGCCCAGA
GCTTCACATACTGGGGCCAAGGCACACAAGTGACAGTCTCGTCTGCTAGCCACC
ATCACCATCACCAC
>SEQ ID NO: 188; DR399(DR230-DR236)
CAAGTGCAGCTGCAAGAGAGCGGAGGAGGACTGGTGCAGCCCGGCGGCTCTCTG
AGGCTGAGCTGTGCTGCCAGCGGCTTCACTTTCAGCAGCGCTCACATGAGCTGGG
TGAGGCAAGCCCCCGGCAAAGGAAGGGAGTGGATCGCCTCCATCTACAGCGGCG
GCGGAACATTCTACGCCGACAGCGTGAAGGGAAGGTTCACAATCTCTAGGGACA
ACGCCAAGAACACACTGTATCTGCAGCTGAACTCTCTGAAGGCCGAGGACACTG
CCATGTACTACTGCGCCACTAATAGGCTGCACTACTACAGCGACGATGATTCTCT
GAGGGGCCAAGGCACACAAGTGACAGTCTCGAGCGGCGGAGGATCCCAAGTGC
AGCTGCAAGAGAGCGGAGGAGGAAGCGTGCAAGCCGGAGGCTCTCTGAGGCTG
AGCTGTGCCGCCTCTAGGTTCACATACAGCAGCTACTGCATGGGCTGGTTCAGAC
AAGCCCCCGGCAAAGAGAGAGAAGGCGTGGCCAGCATCGATAGCGATGGCTCC
ACTAGCTACACTGACAGCGTGAAGGGAAGGTTCACTATCAGCAAGGACAACGCC
AAGAACACTCTGTATCTGCAGATGAACTCTCTGAAGCCAGAGGACACAGCCATG
TACTACTGTGCCCTCGATCTGATGAGCACAGTGGTGCCCGGCTTCTGTGGCTTTCT
GCTGAGCGCTGGCATGGATTACTGGGGCAAGGGCACTCAAGTGACTGTCTCGTCT
GCTAGCCACCATCACCATCACCAC
>SEQ ID NO: 189; DR400(DR230-DR237)
CAAGTGCAGCTGCAAGAGAGCGGAGGAGGACTGGTGCAGCCCGGCGGCTCTCTG
AGGCTGAGCTGTGCTGCCAGCGGCTTCACTTTCAGCAGCGCTCACATGAGCTGGG
TGAGGCAAGCCCCCGGCAAAGGAAGGGAGTGGATCGCCTCCATCTACAGCGGCG
GCGGAACATTCTACGCCGACAGCGTGAAGGGAAGGTTCACAATCTCTAGGGACA
ACGCCAAGAACACACTGTATCTGCAGCTGAACTCTCTGAAGGCCGAGGACACTG
CCATGTACTACTGCGCCACTAATAGGCTGCACTACTACAGCGACGATGATTCTCT
GAGGGGCCAAGGCACACAAGTGACAGTCTCGAGCGGCGGAGGATCCCAAGTGC
AGCTGCAAGAGTCCGGAGGAGGCAGCGTCCAAGCCGGAGGCTCTCTGAGGCTGA
GCTGTGCTGCCAGCGGCTACACTTACAGCATGTACTGCATGGGCTGGTTCAGACA
AGCCCCCGGCAAGGAAAGAGAGGGCGTGGCCCAGATCAATAGCGATGGCAGCA
CAAGCTACGCCGACAGCGTGAAGGGAAGGTTCACTATCTCCAAGGACAACGCCA
AGAACACTCTGTATCTGCAGATGAACTCTCTGAAGCCAGAGGACACTGCCATGT
ACTACTGCGCTGCCGATTCTAGGGTGTACGGCGGCAGCTGGTATGAGAGGCTCTG
CGGCCCTTACACATACGAGTACAACTACTGGGGCCAAGGCACACAAGTGACTGT
CTCGTCTGCTAGCCACCATCACCATCACCAC
>SEQ ID NO: 190; DR401(DR230-DR238)
CAAGTGCAGCTGCAAGAGAGCGGAGGAGGACTGGTGCAGCCCGGCGGCTCTCTG
AGGCTGAGCTGTGCTGCCAGCGGCTTCACTTTCAGCAGCGCTCACATGAGCTGGG
TGAGGCAAGCCCCCGGCAAAGGAAGGGAGTGGATCGCCTCCATCTACAGCGGCG
GCGGAACATTCTACGCCGACAGCGTGAAGGGAAGGTTCACAATCTCTAGGGACA
ACGCCAAGAACACACTGTATCTGCAGCTGAACTCTCTGAAGGCCGAGGACACTG
CCATGTACTACTGCGCCACTAATAGGCTGCACTACTACAGCGACGATGATTCTCT
GAGGGGCCAAGGCACACAAGTGACAGTCTCGAGCGGCGGAGGATCCCAAGTGC
AGCTGCAAGAGAGCGGCGGAGGAAGCGTGCAAGCCGGAGGATCTCTGAGACTG
AGCTGCGCTGTGAGCGGCTACGCCTACTCCACATACTGCATGGGCTGGTTTAGGC
AAGCCCCCGGCAAAGAGAGAGAGGGCGTGGCTGCTATCGATAGCGGCGGCAGC
ACAAGCTACGCCGATAGCGTGAAGGGAAGGTTCACAATCAGCAAGGACAACGCC
AAGAACACACTGTATCTGAGGATGAACTCTCTGAAGCCAGAGGACACAGCCATG
TACTACTGTGCTGCTGTGCCTCCTCCTCCAGATGGCGGCAGCTGTCTGTTTCTGGG
ACCAGAGATCAAGGTCAGCAAGGCCGATTTTAGGTACTGGGGCCAAGGCACACA
AGTGACAGTCTCGTCTGCTAGCCACCATCACCATCACCAC
>SEQ ID NO: 191; DR402(DR230-DR239)
CAAGTGCAGCTGCAAGAGAGCGGAGGAGGACTGGTGCAGCCCGGCGGCTCTCTG
AGGCTGAGCTGTGCTGCCAGCGGCTTCACTTTCAGCAGCGCTCACATGAGCTGGG
TGAGGCAAGCCCCCGGCAAAGGAAGGGAGTGGATCGCCTCCATCTACAGCGGCG
GCGGAACATTCTACGCCGACAGCGTGAAGGGAAGGTTCACAATCTCTAGGGACA
ACGCCAAGAACACACTGTATCTGCAGCTGAACTCTCTGAAGGCCGAGGACACTG
CCATGTACTACTGCGCCACTAATAGGCTGCACTACTACAGCGACGATGATTCTCT
GAGGGGCCAAGGCACACAAGTGACAGTCTCGAGCGGCGGAGGATCCCAAGTGC
AGCTGCAAGAGAGCGGAGGAGGAAGCGTGCAAGCCGGAGGCTCTCTGAGGCTG
AGCTGTACAGTGTCCGGCTACACTTACAGCTCCAATTGCATGGGCTGGTTTAGGC
AAGCCCCCGGCAAGGAAAGAGAGGGCGTGGCCACTATCTACACTGGCGGCGGCA
ACACATACTACGCCGATAGCGTGAAGGGAAGGTTCACTATCAGCCAAGATAACG
CCAAGAACACAGTGTATCTGCAGATGAACAATCTGAAGCCAGAGGACACTGCCA
TGTACTACTGTGCTGCTGAGCCACTGTCTAGGGTGTACGGCGGCAGCTGCCCAAC
TCCTACATTCGACTACTGGGGCCAAGGCACACAAGTGACTGTCTCGTCTGCTAGC
CACCATCACCATCACCAC
>SEQ ID NO: 192; DR403(DR230-DR240)
CAAGTGCAGCTGCAAGAGAGCGGAGGAGGACTGGTGCAGCCCGGCGGCTCTCTG
AGGCTGAGCTGTGCTGCCAGCGGCTTCACTTTCAGCAGCGCTCACATGAGCTGGG
TGAGGCAAGCCCCCGGCAAAGGAAGGGAGTGGATCGCCTCCATCTACAGCGGCG
GCGGAACATTCTACGCCGACAGCGTGAAGGGAAGGTTCACAATCTCTAGGGACA
ACGCCAAGAACACACTGTATCTGCAGCTGAACTCTCTGAAGGCCGAGGACACTG
CCATGTACTACTGCGCCACTAATAGGCTGCACTACTACAGCGACGATGATTCTCT
GAGGGGCCAAGGCACACAAGTGACAGTCTCGAGCGGCGGAGGATCCCAAGTGC
AGCTGCAAGAGAGCGGAGGAGGAAGCGTCCAAGCCGGAGGCTCTCTGAGGCTG
AGCTGTGGAGCCAGCGGCTACACTTACAGCAGCTACTGTATGGGCTGGTTTAGGC
AAGTGCCCGGCAAGGAGAGAGAGGGCGTGGCCGTGATCGATTCCGATGGCAGCA
CAAGCTACGCTGACAGCGTGAAGGGAAGGTTCACAATCAGCAAGGACAACGGC
AAGAACACACTCTATCTGCAGATGAACAGCCTCAAGCCAGAGGACACAGCCATG
TACTACTGCGCCGCTGATCTGGGCCACTATAGGCCTCCTTGTGGCGTGCTGTATC
TGGGCATGGATTACTGGGGCAAGGGCACACAAGTGACAGTCTCGTCTGCTAGCC
ACCATCACCATCACCAC
>SEQ ID NO: 193; DR404(DR230-DR241)
CAAGTGCAGCTGCAAGAGAGCGGAGGAGGACTGGTGCAGCCCGGCGGCTCTCTG
AGGCTGAGCTGTGCTGCCAGCGGCTTCACTTTCAGCAGCGCTCACATGAGCTGGG
TGAGGCAAGCCCCCGGCAAAGGAAGGGAGTGGATCGCCTCCATCTACAGCGGCG
GCGGAACATTCTACGCCGACAGCGTGAAGGGAAGGTTCACAATCTCTAGGGACA
ACGCCAAGAACACACTGTATCTGCAGCTGAACTCTCTGAAGGCCGAGGACACTG
CCATGTACTACTGCGCCACTAATAGGCTGCACTACTACAGCGACGATGATTCTCT
GAGGGGCCAAGGCACACAAGTGACAGTCTCGAGCGGCGGAGGATCCCAAGTGC
AGCTGCAAGAGAGCGGAGGAGGAAGCGTCCAAGCCGGAGGCTCTCTGAGACTG
AGCTGTGCCGCCAGCGGCTACTCCAACTGCAGCTACGACATGACTTGGTATAGGC
AAGCCCCCGGCAAGGAGAGGGAGTTCGTGTCCGCCATCCACAGCGACGGCAGCA
CTAGATACGCCGACAGCGTGAAGGGAAGGTTCTTCATCAGCCAAGATAACGCCA
AGAACACAGTGTATCTGCAGATGAACTCCCTCAAGCCAGAGGACACTGCCATGT
ACTACTGCAAGACAGACCCACTGCACTGCAGAGCCCATGGCGGCAGCTGGTATA
GCGTGAGGGCCAACTACTGGGGCCAAGGCACACAAGTGACAGTCTCGTCTGCTA
GCCACCATCACCATCACCAC
>SEQ ID NO: 194; DR405(DR231-DR235)
CAAGTGCAGCTGCAAGAGAGCGGAGGAGGAAGCGTGCAAGCCGGCGGATCTCT
GAGACTCAGCTGTACTGCCTCCGGCTTCACATTCGACGATAGGGAGATGAACTG
GTATAGGCAAGCCCCCGGCAATGAGTGCGAGCTGGTGAGCACAATCTCCAGCGA
TGGCAGCACTTACTACGCCGATAGCGTGAAGGGAAGGTTCACTATCTCCCAAGA
TAACGCCAAGAACACAGTCTATCTGCAGATGGACTCCGTCAAGCCAGAGGATAC
TGCCGTGTACTACTGCGCCGCCGACTTCATGATCGCCATCCAAGCCCCCGGCGCT
GGCTGTTGGGGACAAGGCACTCAAGTGACAGTCTCGAGCGGCGGAGGATCCCAA
GTGCAGCTGCAAGAGAGCGGAGGAGGAAGCGTGCAAGCCGGAGGCTCTCTGAG
ACTGAGCTGTGCCGCCTCTAGGTATCTGTACAGCATCGACTACATGGCTTGGTTC
AGACAGAGCCCCGGCAAGGAGAGGGAGCCAGTGGCTGTCATCTACACTGCCTCC
GGCGCCACATTCTATCCAGATAGCGTGAAGGGAAGGTTCACTATCAGCCAAGAT
AACGCCAAGATGACAGTGTATCTGCAGATGAACTCTCTGAAGAGCGAGGACACT
GCCATGTACTACTGTGCCGCCGTGAGGAAGACAGATAGCTACCTCTTCGACGCCC
AGAGCTTCACATACTGGGGCCAAGGCACACAAGTGACAGTCTCGTCTGCTAGCC
ACCATCACCATCACCAC
>SEQ ID NO: 195; DR406(DR231-DR236)
CAAGTGCAGCTGCAAGAGAGCGGAGGAGGAAGCGTGCAAGCCGGCGGATCTCT
GAGACTCAGCTGTACTGCCTCCGGCTTCACATTCGACGATAGGGAGATGAACTG
GTATAGGCAAGCCCCCGGCAATGAGTGCGAGCTGGTGAGCACAATCTCCAGCGA
TGGCAGCACTTACTACGCCGATAGCGTGAAGGGAAGGTTCACTATCTCCCAAGA
TAACGCCAAGAACACAGTCTATCTGCAGATGGACTCCGTCAAGCCAGAGGATAC
TGCCGTGTACTACTGCGCCGCCGACTTCATGATCGCCATCCAAGCCCCCGGCGCT
GGCTGTTGGGGACAAGGCACTCAAGTGACAGTCTCGAGCGGCGGAGGATCCCAA
GTGCAGCTGCAAGAGAGCGGAGGAGGAAGCGTGCAAGCCGGAGGCTCTCTGAG
GCTGAGCTGTGCCGCCTCTAGGTTCACATACAGCAGCTACTGCATGGGCTGGTTC
AGACAAGCCCCCGGCAAAGAGAGAGAAGGCGTGGCCAGCATCGATAGCGATGG
CTCCACTAGCTACACTGACAGCGTGAAGGGAAGGTTCACTATCAGCAAGGACAA
CGCCAAGAACACTCTGTATCTGCAGATGAACTCTCTGAAGCCAGAGGACACAGC
CATGTACTACTGTGCCCTCGATCTGATGAGCACAGTGGTGCCCGGCTTCTGTGGC
TTTCTGCTGAGCGCTGGCATGGATTACTGGGGCAAGGGCACTCAAGTGACTGTCT
CGTCTGCTAGCCACCATCACCATCACCAC
>SEQ ID NO: 196; DR407(DR231-DR237)
CAAGTGCAGCTGCAAGAGAGCGGAGGAGGAAGCGTGCAAGCCGGCGGATCTCT
GAGACTCAGCTGTACTGCCTCCGGCTTCACATTCGACGATAGGGAGATGAACTG
GTATAGGCAAGCCCCCGGCAATGAGTGCGAGCTGGTGAGCACAATCTCCAGCGA
TGGCAGCACTTACTACGCCGATAGCGTGAAGGGAAGGTTCACTATCTCCCAAGA
TAACGCCAAGAACACAGTCTATCTGCAGATGGACTCCGTCAAGCCAGAGGATAC
TGCCGTGTACTACTGCGCCGCCGACTTCATGATCGCCATCCAAGCCCCCGGCGCT
GGCTGTTGGGGACAAGGCACTCAAGTGACAGTCTCGAGCGGCGGAGGATCCCAA
GTGCAGCTGCAAGAGTCCGGAGGAGGCAGCGTCCAAGCCGGAGGCTCTCTGAGG
CTGAGCTGTGCTGCCAGCGGCTACACTTACAGCATGTACTGCATGGGCTGGTTCA
GACAAGCCCCCGGCAAGGAAAGAGAGGGCGTGGCCCAGATCAATAGCGATGGC
AGCACAAGCTACGCCGACAGCGTGAAGGGAAGGTTCACTATCTCCAAGGACAAC
GCCAAGAACACTCTGTATCTGCAGATGAACTCTCTGAAGCCAGAGGACACTGCC
ATGTACTACTGCGCTGCCGATTCTAGGGTGTACGGCGGCAGCTGGTATGAGAGG
CTCTGCGGCCCTTACACATACGAGTACAACTACTGGGGCCAAGGCACACAAGTG
ACTGTCTCGTCTGCTAGCCACCATCACCATCACCAC
>SEQ ID NO: 197; DR408(DR231-DR238)
CAAGTGCAGCTGCAAGAGAGCGGAGGAGGAAGCGTGCAAGCCGGCGGATCTCT
GAGACTCAGCTGTACTGCCTCCGGCTTCACATTCGACGATAGGGAGATGAACTG
GTATAGGCAAGCCCCCGGCAATGAGTGCGAGCTGGTGAGCACAATCTCCAGCGA
TGGCAGCACTTACTACGCCGATAGCGTGAAGGGAAGGTTCACTATCTCCCAAGA
TAACGCCAAGAACACAGTCTATCTGCAGATGGACTCCGTCAAGCCAGAGGATAC
TGCCGTGTACTACTGCGCCGCCGACTTCATGATCGCCATCCAAGCCCCCGGCGCT
GGCTGTTGGGGACAAGGCACTCAAGTGACAGTCTCGAGCGGCGGAGGATCCCAA
GTGCAGCTGCAAGAGAGCGGCGGAGGAAGCGTGCAAGCCGGAGGATCTCTGAG
ACTGAGCTGCGCTGTGAGCGGCTACGCCTACTCCACATACTGCATGGGCTGGTTT
AGGCAAGCCCCCGGCAAAGAGAGAGAGGGCGTGGCTGCTATCGATAGCGGCGG
CAGCACAAGCTACGCCGATAGCGTGAAGGGAAGGTTCACAATCAGCAAGGACA
ACGCCAAGAACACACTGTATCTGAGGATGAACTCTCTGAAGCCAGAGGACACAG
CCATGTACTACTGTGCTGCTGTGCCTCCTCCTCCAGATGGCGGCAGCTGTCTGTTT
CTGGGACCAGAGATCAAGGTCAGCAAGGCCGATTTTAGGTACTGGGGCCAAGGC
ACACAAGTGACAGTCTCGTCTGCTAGCCACCATCACCATCACCAC
>SEQ ID NO: 198; DR409(DR231-DR239)
CAAGTGCAGCTGCAAGAGAGCGGAGGAGGAAGCGTGCAAGCCGGCGGATCTCT
GAGACTCAGCTGTACTGCCTCCGGCTTCACATTCGACGATAGGGAGATGAACTG
GTATAGGCAAGCCCCCGGCAATGAGTGCGAGCTGGTGAGCACAATCTCCAGCGA
TGGCAGCACTTACTACGCCGATAGCGTGAAGGGAAGGTTCACTATCTCCCAAGA
TAACGCCAAGAACACAGTCTATCTGCAGATGGACTCCGTCAAGCCAGAGGATAC
TGCCGTGTACTACTGCGCCGCCGACTTCATGATCGCCATCCAAGCCCCCGGCGCT
GGCTGTTGGGGACAAGGCACTCAAGTGACAGTCTCGAGCGGCGGAGGATCCCAA
GTGCAGCTGCAAGAGAGCGGAGGAGGAAGCGTGCAAGCCGGAGGCTCTCTGAG
GCTGAGCTGTACAGTGTCCGGCTACACTTACAGCTCCAATTGCATGGGCTGGTTT
AGGCAAGCCCCCGGCAAGGAAAGAGAGGGCGTGGCCACTATCTACACTGGCGGC
GGCAACACATACTACGCCGATAGCGTGAAGGGAAGGTTCACTATCAGCCAAGAT
AACGCCAAGAACACAGTGTATCTGCAGATGAACAATCTGAAGCCAGAGGACACT
GCCATGTACTACTGTGCTGCTGAGCCACTGTCTAGGGTGTACGGCGGCAGCTGCC
CAACTCCTACATTCGACTACTGGGGCCAAGGCACACAAGTGACTGTCTCGTCTGC
TAGCCACCATCACCATCACCAC
>SEQ ID NO: 199; DR410(DR231-DR240)
CAAGTGCAGCTGCAAGAGAGCGGAGGAGGAAGCGTGCAAGCCGGCGGATCTCT
GAGACTCAGCTGTACTGCCTCCGGCTTCACATTCGACGATAGGGAGATGAACTG
GTATAGGCAAGCCCCCGGCAATGAGTGCGAGCTGGTGAGCACAATCTCCAGCGA
TGGCAGCACTTACTACGCCGATAGCGTGAAGGGAAGGTTCACTATCTCCCAAGA
TAACGCCAAGAACACAGTCTATCTGCAGATGGACTCCGTCAAGCCAGAGGATAC
TGCCGTGTACTACTGCGCCGCCGACTTCATGATCGCCATCCAAGCCCCCGGCGCT
GGCTGTTGGGGACAAGGCACTCAAGTGACAGTCTCGAGCGGCGGAGGATCCCAA
GTGCAGCTGCAAGAGAGCGGAGGAGGAAGCGTCCAAGCCGGAGGCTCTCTGAG
GCTGAGCTGTGGAGCCAGCGGCTACACTTACAGCAGCTACTGTATGGGCTGGTTT
AGGCAAGTGCCCGGCAAGGAGAGAGAGGGCGTGGCCGTGATCGATTCCGATGGC
AGCACAAGCTACGCTGACAGCGTGAAGGGAAGGTTCACAATCAGCAAGGACAA
CGGCAAGAACACACTCTATCTGCAGATGAACAGCCTCAAGCCAGAGGACACAGC
CATGTACTACTGCGCCGCTGATCTGGGCCACTATAGGCCTCCTTGTGGCGTGCTG
TATCTGGGCATGGATTACTGGGGCAAGGGCACACAAGTGACAGTCTCGTCTGCT
AGCCACCATCACCATCACCAC
>SEQ ID NO: 200; DR411(DR231-DR241)
CAAGTGCAGCTGCAAGAGAGCGGAGGAGGAAGCGTGCAAGCCGGCGGATCTCT
GAGACTCAGCTGTACTGCCTCCGGCTTCACATTCGACGATAGGGAGATGAACTG
GTATAGGCAAGCCCCCGGCAATGAGTGCGAGCTGGTGAGCACAATCTCCAGCGA
TGGCAGCACTTACTACGCCGATAGCGTGAAGGGAAGGTTCACTATCTCCCAAGA
TAACGCCAAGAACACAGTCTATCTGCAGATGGACTCCGTCAAGCCAGAGGATAC
TGCCGTGTACTACTGCGCCGCCGACTTCATGATCGCCATCCAAGCCCCCGGCGCT
GGCTGTTGGGGACAAGGCACTCAAGTGACAGTCTCGAGCGGCGGAGGATCCCAA
GTGCAGCTGCAAGAGAGCGGAGGAGGAAGCGTCCAAGCCGGAGGCTCTCTGAG
ACTGAGCTGTGCCGCCAGCGGCTACTCCAACTGCAGCTACGACATGACTTGGTAT
AGGCAAGCCCCCGGCAAGGAGAGGGAGTTCGTGTCCGCCATCCACAGCGACGGC
AGCACTAGATACGCCGACAGCGTGAAGGGAAGGTTCTTCATCAGCCAAGATAAC
GCCAAGAACACAGTGTATCTGCAGATGAACTCCCTCAAGCCAGAGGACACTGCC
ATGTACTACTGCAAGACAGACCCACTGCACTGCAGAGCCCATGGCGGCAGCTGG
TATAGCGTGAGGGCCAACTACTGGGGCCAAGGCACACAAGTGACAGTCTCGTCT
GCTAGCCACCATCACCATCACCAC
>SEQ ID NO: 201; DR412(DR232-DR235)
CAAGTGCAGCTGCAAGAGAGCGGAGGAGGCAGCGTGCAAGCCGGAGGCTCTCT
GAGACTGAGCTGTGTGGCTAGTGGCTACACAAGCTGCATGGGCTGGTTTAGGCA
AGCCCCCGGCAAGGAGAGAGAGGCCGTGGCCACAATCTACACTAGGGGAAGGA
GCATCTACTACGCCGACAGCGTGAAAGGAAGGTTCACAATCAGCCAAGATAACG
CCAAGAACACTCTGTATCTGCAGATGAACAGCCTCAAGCCAGAGGACATCGCCA
TGTATAGCTGTGCTGCTGGCGGCTATAGCTGGAGCGCTGGCTGCGAGTTCAATTA
CTGGGGCCAAGGCACACAAGTGACTGTCTCGAGCGGCGGAGGATCCCAAGTGCA
GCTGCAAGAGAGCGGAGGAGGAAGCGTGCAAGCCGGAGGCTCTCTGAGACTGA
GCTGTGCCGCCTCTAGGTATCTGTACAGCATCGACTACATGGCTTGGTTCAGACA
GAGCCCCGGCAAGGAGAGGGAGCCAGTGGCTGTCATCTACACTGCCTCCGGCGC
CACATTCTATCCAGATAGCGTGAAGGGAAGGTTCACTATCAGCCAAGATAACGC
CAAGATGACAGTGTATCTGCAGATGAACTCTCTGAAGAGCGAGGACACTGCCAT
GTACTACTGTGCCGCCGTGAGGAAGACAGATAGCTACCTCTTCGACGCCCAGAG
CTTCACATACTGGGGCCAAGGCACACAAGTGACAGTCTCGTCTGCTAGCCACCAT
CACCATCACCAC
>SEQ ID NO: 202; DR413(DR232-DR236)
CAAGTGCAGCTGCAAGAGAGCGGAGGAGGCAGCGTGCAAGCCGGAGGCTCTCT
GAGACTGAGCTGTGTGGCTAGTGGCTACACAAGCTGCATGGGCTGGTTTAGGCA
AGCCCCCGGCAAGGAGAGAGAGGCCGTGGCCACAATCTACACTAGGGGAAGGA
GCATCTACTACGCCGACAGCGTGAAAGGAAGGTTCACAATCAGCCAAGATAACG
CCAAGAACACTCTGTATCTGCAGATGAACAGCCTCAAGCCAGAGGACATCGCCA
TGTATAGCTGTGCTGCTGGCGGCTATAGCTGGAGCGCTGGCTGCGAGTTCAATTA
CTGGGGCCAAGGCACACAAGTGACTGTCTCGAGCGGCGGAGGATCCCAAGTGCA
GCTGCAAGAGAGCGGAGGAGGAAGCGTGCAAGCCGGAGGCTCTCTGAGGCTGA
GCTGTGCCGCCTCTAGGTTCACATACAGCAGCTACTGCATGGGCTGGTTCAGACA
AGCCCCCGGCAAAGAGAGAGAAGGCGTGGCCAGCATCGATAGCGATGGCTCCAC
TAGCTACACTGACAGCGTGAAGGGAAGGTTCACTATCAGCAAGGACAACGCCAA
GAACACTCTGTATCTGCAGATGAACTCTCTGAAGCCAGAGGACACAGCCATGTA
CTACTGTGCCCTCGATCTGATGAGCACAGTGGTGCCCGGCTTCTGTGGCTTTCTG
CTGAGCGCTGGCATGGATTACTGGGGCAAGGGCACTCAAGTGACTGTCTCGTCTG
CTAGCCACCATCACCATCACCAC
>SEQ ID NO: 203; DR414(DR232-DR237)
CAAGTGCAGCTGCAAGAGAGCGGAGGAGGCAGCGTGCAAGCCGGAGGCTCTCT
GAGACTGAGCTGTGTGGCTAGTGGCTACACAAGCTGCATGGGCTGGTTTAGGCA
AGCCCCCGGCAAGGAGAGAGAGGCCGTGGCCACAATCTACACTAGGGGAAGGA
GCATCTACTACGCCGACAGCGTGAAAGGAAGGTTCACAATCAGCCAAGATAACG
CCAAGAACACTCTGTATCTGCAGATGAACAGCCTCAAGCCAGAGGACATCGCCA
TGTATAGCTGTGCTGCTGGCGGCTATAGCTGGAGCGCTGGCTGCGAGTTCAATTA
CTGGGGCCAAGGCACACAAGTGACTGTCTCGAGCGGCGGAGGATCCCAAGTGCA
GCTGCAAGAGTCCGGAGGAGGCAGCGTCCAAGCCGGAGGCTCTCTGAGGCTGAG
CTGTGCTGCCAGCGGCTACACTTACAGCATGTACTGCATGGGCTGGTTCAGACAA
GCCCCCGGCAAGGAAAGAGAGGGCGTGGCCCAGATCAATAGCGATGGCAGCAC
AAGCTACGCCGACAGCGTGAAGGGAAGGTTCACTATCTCCAAGGACAACGCCAA
GAACACTCTGTATCTGCAGATGAACTCTCTGAAGCCAGAGGACACTGCCATGTAC
TACTGCGCTGCCGATTCTAGGGTGTACGGCGGCAGCTGGTATGAGAGGCTCTGCG
GCCCTTACACATACGAGTACAACTACTGGGGCCAAGGCACACAAGTGACTGTCT
CGTCTGCTAGCCACCATCACCATCACCAC
>SEQ ID NO: 204; DR415(DR232-DR238)
CAAGTGCAGCTGCAAGAGAGCGGAGGAGGCAGCGTGCAAGCCGGAGGCTCTCT
GAGACTGAGCTGTGTGGCTAGTGGCTACACAAGCTGCATGGGCTGGTTTAGGCA
AGCCCCCGGCAAGGAGAGAGAGGCCGTGGCCACAATCTACACTAGGGGAAGGA
GCATCTACTACGCCGACAGCGTGAAAGGAAGGTTCACAATCAGCCAAGATAACG
CCAAGAACACTCTGTATCTGCAGATGAACAGCCTCAAGCCAGAGGACATCGCCA
TGTATAGCTGTGCTGCTGGCGGCTATAGCTGGAGCGCTGGCTGCGAGTTCAATTA
CTGGGGCCAAGGCACACAAGTGACTGTCTCGAGCGGCGGAGGATCCCAAGTGCA
GCTGCAAGAGAGCGGCGGAGGAAGCGTGCAAGCCGGAGGATCTCTGAGACTGA
GCTGCGCTGTGAGCGGCTACGCCTACTCCACATACTGCATGGGCTGGTTTAGGCA
AGCCCCCGGCAAAGAGAGAGAGGGCGTGGCTGCTATCGATAGCGGCGGCAGCA
CAAGCTACGCCGATAGCGTGAAGGGAAGGTTCACAATCAGCAAGGACAACGCCA
AGAACACACTGTATCTGAGGATGAACTCTCTGAAGCCAGAGGACACAGCCATGT
ACTACTGTGCTGCTGTGCCTCCTCCTCCAGATGGCGGCAGCTGTCTGTTTCTGGG
ACCAGAGATCAAGGTCAGCAAGGCCGATTTTAGGTACTGGGGCCAAGGCACACA
AGTGACAGTCTCGTCTGCTAGCCACCATCACCATCACCAC
>SEQ ID NO: 205; DR416(DR232-DR239)
CAAGTGCAGCTGCAAGAGAGCGGAGGAGGCAGCGTGCAAGCCGGAGGCTCTCT
GAGACTGAGCTGTGTGGCTAGTGGCTACACAAGCTGCATGGGCTGGTTTAGGCA
AGCCCCCGGCAAGGAGAGAGAGGCCGTGGCCACAATCTACACTAGGGGAAGGA
GCATCTACTACGCCGACAGCGTGAAAGGAAGGTTCACAATCAGCCAAGATAACG
CCAAGAACACTCTGTATCTGCAGATGAACAGCCTCAAGCCAGAGGACATCGCCA
TGTATAGCTGTGCTGCTGGCGGCTATAGCTGGAGCGCTGGCTGCGAGTTCAATTA
CTGGGGCCAAGGCACACAAGTGACTGTCTCGAGCGGCGGAGGATCCCAAGTGCA
GCTGCAAGAGAGCGGAGGAGGAAGCGTGCAAGCCGGAGGCTCTCTGAGGCTGA
GCTGTACAGTGTCCGGCTACACTTACAGCTCCAATTGCATGGGCTGGTTTAGGCA
AGCCCCCGGCAAGGAAAGAGAGGGCGTGGCCACTATCTACACTGGCGGCGGCAA
CACATACTACGCCGATAGCGTGAAGGGAAGGTTCACTATCAGCCAAGATAACGC
CAAGAACACAGTGTATCTGCAGATGAACAATCTGAAGCCAGAGGACACTGCCAT
GTACTACTGTGCTGCTGAGCCACTGTCTAGGGTGTACGGCGGCAGCTGCCCAACT
CCTACATTCGACTACTGGGGCCAAGGCACACAAGTGACTGTCTCGTCTGCTAGCC
ACCATCACCATCACCAC
>SEQ ID NO: 206; DR417(DR232-DR240)
CAAGTGCAGCTGCAAGAGAGCGGAGGAGGCAGCGTGCAAGCCGGAGGCTCTCT
GAGACTGAGCTGTGTGGCTAGTGGCTACACAAGCTGCATGGGCTGGTTTAGGCA
AGCCCCCGGCAAGGAGAGAGAGGCCGTGGCCACAATCTACACTAGGGGAAGGA
GCATCTACTACGCCGACAGCGTGAAAGGAAGGTTCACAATCAGCCAAGATAACG
CCAAGAACACTCTGTATCTGCAGATGAACAGCCTCAAGCCAGAGGACATCGCCA
TGTATAGCTGTGCTGCTGGCGGCTATAGCTGGAGCGCTGGCTGCGAGTTCAATTA
CTGGGGCCAAGGCACACAAGTGACTGTCTCGAGCGGCGGAGGATCCCAAGTGCA
GCTGCAAGAGAGCGGAGGAGGAAGCGTCCAAGCCGGAGGCTCTCTGAGGCTGA
GCTGTGGAGCCAGCGGCTACACTTACAGCAGCTACTGTATGGGCTGGTTTAGGCA
AGTGCCCGGCAAGGAGAGAGAGGGCGTGGCCGTGATCGATTCCGATGGCAGCAC
AAGCTACGCTGACAGCGTGAAGGGAAGGTTCACAATCAGCAAGGACAACGGCA
AGAACACACTCTATCTGCAGATGAACAGCCTCAAGCCAGAGGACACAGCCATGT
ACTACTGCGCCGCTGATCTGGGCCACTATAGGCCTCCTTGTGGCGTGCTGTATCT
GGGCATGGATTACTGGGGCAAGGGCACACAAGTGACAGTCTCGTCTGCTAGCCA
CCATCACCATCACCAC
>SEQ ID NO: 207; DR418(DR232-DR241)
CAAGTGCAGCTGCAAGAGAGCGGAGGAGGCAGCGTGCAAGCCGGAGGCTCTCT
GAGACTGAGCTGTGTGGCTAGTGGCTACACAAGCTGCATGGGCTGGTTTAGGCA
AGCCCCCGGCAAGGAGAGAGAGGCCGTGGCCACAATCTACACTAGGGGAAGGA
GCATCTACTACGCCGACAGCGTGAAAGGAAGGTTCACAATCAGCCAAGATAACG
CCAAGAACACTCTGTATCTGCAGATGAACAGCCTCAAGCCAGAGGACATCGCCA
TGTATAGCTGTGCTGCTGGCGGCTATAGCTGGAGCGCTGGCTGCGAGTTCAATTA
CTGGGGCCAAGGCACACAAGTGACTGTCTCGAGCGGCGGAGGATCCCAAGTGCA
GCTGCAAGAGAGCGGAGGAGGAAGCGTCCAAGCCGGAGGCTCTCTGAGACTGA
GCTGTGCCGCCAGCGGCTACTCCAACTGCAGCTACGACATGACTTGGTATAGGCA
AGCCCCCGGCAAGGAGAGGGAGTTCGTGTCCGCCATCCACAGCGACGGCAGCAC
TAGATACGCCGACAGCGTGAAGGGAAGGTTCTTCATCAGCCAAGATAACGCCAA
GAACACAGTGTATCTGCAGATGAACTCCCTCAAGCCAGAGGACACTGCCATGTA
CTACTGCAAGACAGACCCACTGCACTGCAGAGCCCATGGCGGCAGCTGGTATAG
CGTGAGGGCCAACTACTGGGGCCAAGGCACACAAGTGACAGTCTCGTCTGCTAG
CCACCATCACCATCACCAC
>SEQ ID NO: 208; DR419(DR233-DR235)
CAAGTGCAGCTGCAAGAGAGCGGAGGCGGAAGCGTGCAAGCTGGAGGATCTCT
GAGGCTGAGCTGCACAGCCAGCGGCTTCACTTTCGATGACAGCGACATGGGCTG
GTATAGGCAAGCCCCCGGCAATGAGTGTGAGCTGGTGAGCACAATCAGCAGCGA
CGGCTCCACTTACTACGCCGACAGCGTCAAGGGAAGGTTCACAATCAGCCAAGA
TAACGCCAAGAACACTGTGTATCTGCAGATGAACTCTCTGAAGCCAGAGGACAC
AGCCGTGTACTACTGTGCTGCCGAGCCTAGGGGCTACTATAGCAACTACGGCGG
AAGGAGGGAGTGCAATTACTGGGGCCAAGGCACACAAGTGACAGTCTCGAGCG
GCGGAGGATCCCAAGTGCAGCTGCAAGAGAGCGGAGGAGGAAGCGTGCAAGCC
GGAGGCTCTCTGAGACTGAGCTGTGCCGCCTCTAGGTATCTGTACAGCATCGACT
ACATGGCTTGGTTCAGACAGAGCCCCGGCAAGGAGAGGGAGCCAGTGGCTGTCA
TCTACACTGCCTCCGGCGCCACATTCTATCCAGATAGCGTGAAGGGAAGGTTCAC
TATCAGCCAAGATAACGCCAAGATGACAGTGTATCTGCAGATGAACTCTCTGAA
GAGCGAGGACACTGCCATGTACTACTGTGCCGCCGTGAGGAAGACAGATAGCTA
CCTCTTCGACGCCCAGAGCTTCACATACTGGGGCCAAGGCACACAAGTGACAGT
CTCGTCTGCTAGCCACCATCACCATCACCAC
>SEQ ID NO: 209; DR420(DR233-DR236)
CAAGTGCAGCTGCAAGAGAGCGGAGGCGGAAGCGTGCAAGCTGGAGGATCTCT
GAGGCTGAGCTGCACAGCCAGCGGCTTCACTTTCGATGACAGCGACATGGGCTG
GTATAGGCAAGCCCCCGGCAATGAGTGTGAGCTGGTGAGCACAATCAGCAGCGA
CGGCTCCACTTACTACGCCGACAGCGTCAAGGGAAGGTTCACAATCAGCCAAGA
TAACGCCAAGAACACTGTGTATCTGCAGATGAACTCTCTGAAGCCAGAGGACAC
AGCCGTGTACTACTGTGCTGCCGAGCCTAGGGGCTACTATAGCAACTACGGCGG
AAGGAGGGAGTGCAATTACTGGGGCCAAGGCACACAAGTGACAGTCTCGAGCG
GCGGAGGATCCCAAGTGCAGCTGCAAGAGAGCGGAGGAGGAAGCGTGCAAGCC
GGAGGCTCTCTGAGGCTGAGCTGTGCCGCCTCTAGGTTCACATACAGCAGCTACT
GCATGGGCTGGTTCAGACAAGCCCCCGGCAAAGAGAGAGAAGGCGTGGCCAGC
ATCGATAGCGATGGCTCCACTAGCTACACTGACAGCGTGAAGGGAAGGTTCACT
ATCAGCAAGGACAACGCCAAGAACACTCTGTATCTGCAGATGAACTCTCTGAAG
CCAGAGGACACAGCCATGTACTACTGTGCCCTCGATCTGATGAGCACAGTGGTG
CCCGGCTTCTGTGGCTTTCTGCTGAGCGCTGGCATGGATTACTGGGGCAAGGGCA
CTCAAGTGACTGTCTCGTCTGCTAGCCACCATCACCATCACCAC
>SEQ ID NO: 210; DR421(DR233-DR237)
CAAGTGCAGCTGCAAGAGAGCGGAGGCGGAAGCGTGCAAGCTGGAGGATCTCT
GAGGCTGAGCTGCACAGCCAGCGGCTTCACTTTCGATGACAGCGACATGGGCTG
GTATAGGCAAGCCCCCGGCAATGAGTGTGAGCTGGTGAGCACAATCAGCAGCGA
CGGCTCCACTTACTACGCCGACAGCGTCAAGGGAAGGTTCACAATCAGCCAAGA
TAACGCCAAGAACACTGTGTATCTGCAGATGAACTCTCTGAAGCCAGAGGACAC
AGCCGTGTACTACTGTGCTGCCGAGCCTAGGGGCTACTATAGCAACTACGGCGG
AAGGAGGGAGTGCAATTACTGGGGCCAAGGCACACAAGTGACAGTCTCGAGCG
GCGGAGGATCCCAAGTGCAGCTGCAAGAGTCCGGAGGAGGCAGCGTCCAAGCC
GGAGGCTCTCTGAGGCTGAGCTGTGCTGCCAGCGGCTACACTTACAGCATGTACT
GCATGGGCTGGTTCAGACAAGCCCCCGGCAAGGAAAGAGAGGGCGTGGCCCAG
ATCAATAGCGATGGCAGCACAAGCTACGCCGACAGCGTGAAGGGAAGGTTCACT
ATCTCCAAGGACAACGCCAAGAACACTCTGTATCTGCAGATGAACTCTCTGAAG
CCAGAGGACACTGCCATGTACTACTGCGCTGCCGATTCTAGGGTGTACGGCGGC
AGCTGGTATGAGAGGCTCTGCGGCCCTTACACATACGAGTACAACTACTGGGGC
CAAGGCACACAAGTGACTGTCTCGTCTGCTAGCCACCATCACCATCACCAC
>SEQ ID NO: 211; DR422(DR233-DR238)
CAAGTGCAGCTGCAAGAGAGCGGAGGCGGAAGCGTGCAAGCTGGAGGATCTCT
GAGGCTGAGCTGCACAGCCAGCGGCTTCACTTTCGATGACAGCGACATGGGCTG
GTATAGGCAAGCCCCCGGCAATGAGTGTGAGCTGGTGAGCACAATCAGCAGCGA
CGGCTCCACTTACTACGCCGACAGCGTCAAGGGAAGGTTCACAATCAGCCAAGA
TAACGCCAAGAACACTGTGTATCTGCAGATGAACTCTCTGAAGCCAGAGGACAC
AGCCGTGTACTACTGTGCTGCCGAGCCTAGGGGCTACTATAGCAACTACGGCGG
AAGGAGGGAGTGCAATTACTGGGGCCAAGGCACACAAGTGACAGTCTCGAGCG
GCGGAGGATCCCAAGTGCAGCTGCAAGAGAGCGGCGGAGGAAGCGTGCAAGCC
GGAGGATCTCTGAGACTGAGCTGCGCTGTGAGCGGCTACGCCTACTCCACATACT
GCATGGGCTGGTTTAGGCAAGCCCCCGGCAAAGAGAGAGAGGGCGTGGCTGCTA
TCGATAGCGGCGGCAGCACAAGCTACGCCGATAGCGTGAAGGGAAGGTTCACAA
TCAGCAAGGACAACGCCAAGAACACACTGTATCTGAGGATGAACTCTCTGAAGC
CAGAGGACACAGCCATGTACTACTGTGCTGCTGTGCCTCCTCCTCCAGATGGCGG
CAGCTGTCTGTTTCTGGGACCAGAGATCAAGGTCAGCAAGGCCGATTTTAGGTAC
TGGGGCCAAGGCACACAAGTGACAGTCTCGTCTGCTAGCCACCATCACCATCAC
CAC
>SEQ ID NO: 212; DR423(DR233-DR239)
CAAGTGCAGCTGCAAGAGAGCGGAGGCGGAAGCGTGCAAGCTGGAGGATCTCT
GAGGCTGAGCTGCACAGCCAGCGGCTTCACTTTCGATGACAGCGACATGGGCTG
GTATAGGCAAGCCCCCGGCAATGAGTGTGAGCTGGTGAGCACAATCAGCAGCGA
CGGCTCCACTTACTACGCCGACAGCGTCAAGGGAAGGTTCACAATCAGCCAAGA
TAACGCCAAGAACACTGTGTATCTGCAGATGAACTCTCTGAAGCCAGAGGACAC
AGCCGTGTACTACTGTGCTGCCGAGCCTAGGGGCTACTATAGCAACTACGGCGG
AAGGAGGGAGTGCAATTACTGGGGCCAAGGCACACAAGTGACAGTCTCGAGCG
GCGGAGGATCCCAAGTGCAGCTGCAAGAGAGCGGAGGAGGAAGCGTGCAAGCC
GGAGGCTCTCTGAGGCTGAGCTGTACAGTGTCCGGCTACACTTACAGCTCCAATT
GCATGGGCTGGTTTAGGCAAGCCCCCGGCAAGGAAAGAGAGGGCGTGGCCACTA
TCTACACTGGCGGCGGCAACACATACTACGCCGATAGCGTGAAGGGAAGGTTCA
CTATCAGCCAAGATAACGCCAAGAACACAGTGTATCTGCAGATGAACAATCTGA
AGCCAGAGGACACTGCCATGTACTACTGTGCTGCTGAGCCACTGTCTAGGGTGTA
CGGCGGCAGCTGCCCAACTCCTACATTCGACTACTGGGGCCAAGGCACACAAGT
GACTGTCTCGTCTGCTAGCCACCATCACCATCACCAC
>SEQ ID NO: 213; DR424(DR233-DR240)
CAAGTGCAGCTGCAAGAGAGCGGAGGCGGAAGCGTGCAAGCTGGAGGATCTCT
GAGGCTGAGCTGCACAGCCAGCGGCTTCACTTTCGATGACAGCGACATGGGCTG
GTATAGGCAAGCCCCCGGCAATGAGTGTGAGCTGGTGAGCACAATCAGCAGCGA
CGGCTCCACTTACTACGCCGACAGCGTCAAGGGAAGGTTCACAATCAGCCAAGA
TAACGCCAAGAACACTGTGTATCTGCAGATGAACTCTCTGAAGCCAGAGGACAC
AGCCGTGTACTACTGTGCTGCCGAGCCTAGGGGCTACTATAGCAACTACGGCGG
AAGGAGGGAGTGCAATTACTGGGGCCAAGGCACACAAGTGACAGTCTCGAGCG
GCGGAGGATCCCAAGTGCAGCTGCAAGAGAGCGGAGGAGGAAGCGTCCAAGCC
GGAGGCTCTCTGAGGCTGAGCTGTGGAGCCAGCGGCTACACTTACAGCAGCTAC
TGTATGGGCTGGTTTAGGCAAGTGCCCGGCAAGGAGAGAGAGGGCGTGGCCGTG
ATCGATTCCGATGGCAGCACAAGCTACGCTGACAGCGTGAAGGGAAGGTTCACA
ATCAGCAAGGACAACGGCAAGAACACACTCTATCTGCAGATGAACAGCCTCAAG
CCAGAGGACACAGCCATGTACTACTGCGCCGCTGATCTGGGCCACTATAGGCCTC
CTTGTGGCGTGCTGTATCTGGGCATGGATTACTGGGGCAAGGGCACACAAGTGA
CAGTCTCGTCTGCTAGCCACCATCACCATCACCAC
>SEQ ID NO: 214; DR425(DR233-DR241)
CAAGTGCAGCTGCAAGAGAGCGGAGGCGGAAGCGTGCAAGCTGGAGGATCTCT
GAGGCTGAGCTGCACAGCCAGCGGCTTCACTTTCGATGACAGCGACATGGGCTG
GTATAGGCAAGCCCCCGGCAATGAGTGTGAGCTGGTGAGCACAATCAGCAGCGA
CGGCTCCACTTACTACGCCGACAGCGTCAAGGGAAGGTTCACAATCAGCCAAGA
TAACGCCAAGAACACTGTGTATCTGCAGATGAACTCTCTGAAGCCAGAGGACAC
AGCCGTGTACTACTGTGCTGCCGAGCCTAGGGGCTACTATAGCAACTACGGCGG
AAGGAGGGAGTGCAATTACTGGGGCCAAGGCACACAAGTGACAGTCTCGAGCG
GCGGAGGATCCCAAGTGCAGCTGCAAGAGAGCGGAGGAGGAAGCGTCCAAGCC
GGAGGCTCTCTGAGACTGAGCTGTGCCGCCAGCGGCTACTCCAACTGCAGCTAC
GACATGACTTGGTATAGGCAAGCCCCCGGCAAGGAGAGGGAGTTCGTGTCCGCC
ATCCACAGCGACGGCAGCACTAGATACGCCGACAGCGTGAAGGGAAGGTTCTTC
ATCAGCCAAGATAACGCCAAGAACACAGTGTATCTGCAGATGAACTCCCTCAAG
CCAGAGGACACTGCCATGTACTACTGCAAGACAGACCCACTGCACTGCAGAGCC
CATGGCGGCAGCTGGTATAGCGTGAGGGCCAACTACTGGGGCCAAGGCACACAA
GTGACAGTCTCGTCTGCTAGCCACCATCACCATCACCAC
>SEQ ID NO: 215; DR426(DR234-DR235)
CAAGTGCAGCTGCAAGAGAGCGGAGGAGGAAGCGTGCAAGCCGGAGGCTCTCT
GAGGCTGAGCTGTGTGGCTAGTGGCTACACTTTCAGCAGCTACTGCATGGGCTGG
TTCAGACAAGCCCCCGGCAAGGAAAGGGAAGGAGTGGCCGCTCTGGGCGGAGG
AAGCACATACTACGCTGACAGCGTGAAGGGAAGGTTCACAATCAGCCAAGATAA
CGCCAAGAACACACTGTATCTGCAGATGAACTCTCTGAAGCCAGAGGACACAGC
CATGTACTACTGTGCCGCTGCTTGGGTCGCTTGTCTGGAGTTCGGCGGCAGCTGG
TACGATCTGGCTAGGTACAAGCACTGGGGCCAAGGCACACAAGTGACAGTCTCG
AGCGGCGGAGGATCCCAAGTGCAGCTGCAAGAGAGCGGAGGAGGAAGCGTGCA
AGCCGGAGGCTCTCTGAGACTGAGCTGTGCCGCCTCTAGGTATCTGTACAGCATC
GACTACATGGCTTGGTTCAGACAGAGCCCCGGCAAGGAGAGGGAGCCAGTGGCT
GTCATCTACACTGCCTCCGGCGCCACATTCTATCCAGATAGCGTGAAGGGAAGGT
TCACTATCAGCCAAGATAACGCCAAGATGACAGTGTATCTGCAGATGAACTCTCT
GAAGAGCGAGGACACTGCCATGTACTACTGTGCCGCCGTGAGGAAGACAGATAG
CTACCTCTTCGACGCCCAGAGCTTCACATACTGGGGCCAAGGCACACAAGTGAC
AGTCTCGTCTGCTAGCCACCATCACCATCACCAC
>SEQ ID NO: 216; DR427(DR234-DR236)
CAAGTGCAGCTGCAAGAGAGCGGAGGAGGAAGCGTGCAAGCCGGAGGCTCTCT
GAGGCTGAGCTGTGTGGCTAGTGGCTACACTTTCAGCAGCTACTGCATGGGCTGG
TTCAGACAAGCCCCCGGCAAGGAAAGGGAAGGAGTGGCCGCTCTGGGCGGAGG
AAGCACATACTACGCTGACAGCGTGAAGGGAAGGTTCACAATCAGCCAAGATAA
CGCCAAGAACACACTGTATCTGCAGATGAACTCTCTGAAGCCAGAGGACACAGC
CATGTACTACTGTGCCGCTGCTTGGGTCGCTTGTCTGGAGTTCGGCGGCAGCTGG
TACGATCTGGCTAGGTACAAGCACTGGGGCCAAGGCACACAAGTGACAGTCTCG
AGCGGCGGAGGATCCCAAGTGCAGCTGCAAGAGAGCGGAGGAGGAAGCGTGCA
AGCCGGAGGCTCTCTGAGGCTGAGCTGTGCCGCCTCTAGGTTCACATACAGCAGC
TACTGCATGGGCTGGTTCAGACAAGCCCCCGGCAAAGAGAGAGAAGGCGTGGCC
AGCATCGATAGCGATGGCTCCACTAGCTACACTGACAGCGTGAAGGGAAGGTTC
ACTATCAGCAAGGACAACGCCAAGAACACTCTGTATCTGCAGATGAACTCTCTG
AAGCCAGAGGACACAGCCATGTACTACTGTGCCCTCGATCTGATGAGCACAGTG
GTGCCCGGCTTCTGTGGCTTTCTGCTGAGCGCTGGCATGGATTACTGGGGCAAGG
GCACTCAAGTGACTGTCTCGTCTGCTAGCCACCATCACCATCACCAC
>SEQ ID NO: 217; DR428(DR234-DR237)
CAAGTGCAGCTGCAAGAGAGCGGAGGAGGAAGCGTGCAAGCCGGAGGCTCTCT
GAGGCTGAGCTGTGTGGCTAGTGGCTACACTTTCAGCAGCTACTGCATGGGCTGG
TTCAGACAAGCCCCCGGCAAGGAAAGGGAAGGAGTGGCCGCTCTGGGCGGAGG
AAGCACATACTACGCTGACAGCGTGAAGGGAAGGTTCACAATCAGCCAAGATAA
CGCCAAGAACACACTGTATCTGCAGATGAACTCTCTGAAGCCAGAGGACACAGC
CATGTACTACTGTGCCGCTGCTTGGGTCGCTTGTCTGGAGTTCGGCGGCAGCTGG
TACGATCTGGCTAGGTACAAGCACTGGGGCCAAGGCACACAAGTGACAGTCTCG
AGCGGCGGAGGATCCCAAGTGCAGCTGCAAGAGTCCGGAGGAGGCAGCGTCCA
AGCCGGAGGCTCTCTGAGGCTGAGCTGTGCTGCCAGCGGCTACACTTACAGCAT
GTACTGCATGGGCTGGTTCAGACAAGCCCCCGGCAAGGAAAGAGAGGGCGTGGC
CCAGATCAATAGCGATGGCAGCACAAGCTACGCCGACAGCGTGAAGGGAAGGTT
CACTATCTCCAAGGACAACGCCAAGAACACTCTGTATCTGCAGATGAACTCTCTG
AAGCCAGAGGACACTGCCATGTACTACTGCGCTGCCGATTCTAGGGTGTACGGC
GGCAGCTGGTATGAGAGGCTCTGCGGCCCTTACACATACGAGTACAACTACTGG
GGCCAAGGCACACAAGTGACTGTCTCGTCTGCTAGCCACCATCACCATCACCAC
>SEQ ID NO: 218; DR429(DR234-DR238)
CAAGTGCAGCTGCAAGAGAGCGGAGGAGGAAGCGTGCAAGCCGGAGGCTCTCT
GAGGCTGAGCTGTGTGGCTAGTGGCTACACTTTCAGCAGCTACTGCATGGGCTGG
TTCAGACAAGCCCCCGGCAAGGAAAGGGAAGGAGTGGCCGCTCTGGGCGGAGG
AAGCACATACTACGCTGACAGCGTGAAGGGAAGGTTCACAATCAGCCAAGATAA
CGCCAAGAACACACTGTATCTGCAGATGAACTCTCTGAAGCCAGAGGACACAGC
CATGTACTACTGTGCCGCTGCTTGGGTCGCTTGTCTGGAGTTCGGCGGCAGCTGG
TACGATCTGGCTAGGTACAAGCACTGGGGCCAAGGCACACAAGTGACAGTCTCG
AGCGGCGGAGGATCCCAAGTGCAGCTGCAAGAGAGCGGCGGAGGAAGCGTGCA
AGCCGGAGGATCTCTGAGACTGAGCTGCGCTGTGAGCGGCTACGCCTACTCCAC
ATACTGCATGGGCTGGTTTAGGCAAGCCCCCGGCAAAGAGAGAGAGGGCGTGGC
TGCTATCGATAGCGGCGGCAGCACAAGCTACGCCGATAGCGTGAAGGGAAGGTT
CACAATCAGCAAGGACAACGCCAAGAACACACTGTATCTGAGGATGAACTCTCT
GAAGCCAGAGGACACAGCCATGTACTACTGTGCTGCTGTGCCTCCTCCTCCAGAT
GGCGGCAGCTGTCTGTTTCTGGGACCAGAGATCAAGGTCAGCAAGGCCGATTTT
AGGTACTGGGGCCAAGGCACACAAGTGACAGTCTCGTCTGCTAGCCACCATCAC
CATCACCAC
>SEQ ID NO: 219; DR430(DR234-DR239)
CAAGTGCAGCTGCAAGAGAGCGGAGGAGGAAGCGTGCAAGCCGGAGGCTCTCT
GAGGCTGAGCTGTGTGGCTAGTGGCTACACTTTCAGCAGCTACTGCATGGGCTGG
TTCAGACAAGCCCCCGGCAAGGAAAGGGAAGGAGTGGCCGCTCTGGGCGGAGG
AAGCACATACTACGCTGACAGCGTGAAGGGAAGGTTCACAATCAGCCAAGATAA
CGCCAAGAACACACTGTATCTGCAGATGAACTCTCTGAAGCCAGAGGACACAGC
CATGTACTACTGTGCCGCTGCTTGGGTCGCTTGTCTGGAGTTCGGCGGCAGCTGG
TACGATCTGGCTAGGTACAAGCACTGGGGCCAAGGCACACAAGTGACAGTCTCG
AGCGGCGGAGGATCCCAAGTGCAGCTGCAAGAGAGCGGAGGAGGAAGCGTGCA
AGCCGGAGGCTCTCTGAGGCTGAGCTGTACAGTGTCCGGCTACACTTACAGCTCC
AATTGCATGGGCTGGTTTAGGCAAGCCCCCGGCAAGGAAAGAGAGGGCGTGGCC
ACTATCTACACTGGCGGCGGCAACACATACTACGCCGATAGCGTGAAGGGAAGG
TTCACTATCAGCCAAGATAACGCCAAGAACACAGTGTATCTGCAGATGAACAAT
CTGAAGCCAGAGGACACTGCCATGTACTACTGTGCTGCTGAGCCACTGTCTAGGG
TGTACGGCGGCAGCTGCCCAACTCCTACATTCGACTACTGGGGCCAAGGCACAC
AAGTGACTGTCTCGTCTGCTAGCCACCATCACCATCACCAC
>SEQ ID NO: 220; DR431(DR234-DR240)
CAAGTGCAGCTGCAAGAGAGCGGAGGAGGAAGCGTGCAAGCCGGAGGCTCTCT
GAGGCTGAGCTGTGTGGCTAGTGGCTACACTTTCAGCAGCTACTGCATGGGCTGG
TTCAGACAAGCCCCCGGCAAGGAAAGGGAAGGAGTGGCCGCTCTGGGCGGAGG
AAGCACATACTACGCTGACAGCGTGAAGGGAAGGTTCACAATCAGCCAAGATAA
CGCCAAGAACACACTGTATCTGCAGATGAACTCTCTGAAGCCAGAGGACACAGC
CATGTACTACTGTGCCGCTGCTTGGGTCGCTTGTCTGGAGTTCGGCGGCAGCTGG
TACGATCTGGCTAGGTACAAGCACTGGGGCCAAGGCACACAAGTGACAGTCTCG
AGCGGCGGAGGATCCCAAGTGCAGCTGCAAGAGAGCGGAGGAGGAAGCGTCCA
AGCCGGAGGCTCTCTGAGGCTGAGCTGTGGAGCCAGCGGCTACACTTACAGCAG
CTACTGTATGGGCTGGTTTAGGCAAGTGCCCGGCAAGGAGAGAGAGGGCGTGGC
CGTGATCGATTCCGATGGCAGCACAAGCTACGCTGACAGCGTGAAGGGAAGGTT
CACAATCAGCAAGGACAACGGCAAGAACACACTCTATCTGCAGATGAACAGCCT
CAAGCCAGAGGACACAGCCATGTACTACTGCGCCGCTGATCTGGGCCACTATAG
GCCTCCTTGTGGCGTGCTGTATCTGGGCATGGATTACTGGGGCAAGGGCACACAA
GTGACAGTCTCGTCTGCTAGCCACCATCACCATCACCAC
>SEQ ID NO: 221; DR432(DR234-DR241)
CAAGTGCAGCTGCAAGAGAGCGGAGGAGGAAGCGTGCAAGCCGGAGGCTCTCT
GAGGCTGAGCTGTGTGGCTAGTGGCTACACTTTCAGCAGCTACTGCATGGGCTGG
TTCAGACAAGCCCCCGGCAAGGAAAGGGAAGGAGTGGCCGCTCTGGGCGGAGG
AAGCACATACTACGCTGACAGCGTGAAGGGAAGGTTCACAATCAGCCAAGATAA
CGCCAAGAACACACTGTATCTGCAGATGAACTCTCTGAAGCCAGAGGACACAGC
CATGTACTACTGTGCCGCTGCTTGGGTCGCTTGTCTGGAGTTCGGCGGCAGCTGG
TACGATCTGGCTAGGTACAAGCACTGGGGCCAAGGCACACAAGTGACAGTCTCG
AGCGGCGGAGGATCCCAAGTGCAGCTGCAAGAGAGCGGAGGAGGAAGCGTCCA
AGCCGGAGGCTCTCTGAGACTGAGCTGTGCCGCCAGCGGCTACTCCAACTGCAG
CTACGACATGACTTGGTATAGGCAAGCCCCCGGCAAGGAGAGGGAGTTCGTGTC
CGCCATCCACAGCGACGGCAGCACTAGATACGCCGACAGCGTGAAGGGAAGGTT
CTTCATCAGCCAAGATAACGCCAAGAACACAGTGTATCTGCAGATGAACTCCCTC
AAGCCAGAGGACACTGCCATGTACTACTGCAAGACAGACCCACTGCACTGCAGA
GCCCATGGCGGCAGCTGGTATAGCGTGAGGGCCAACTACTGGGGCCAAGGCACA
CAAGTGACAGTCTCGTCTGCTAGCCACCATCACCATCACCAC
>SEQ ID NO: 222; DR433(DR235-DR229)
CAAGTGCAGCTGCAAGAGAGCGGAGGAGGAAGCGTGCAAGCCGGAGGCTCTCT
GAGACTGAGCTGTGCCGCCTCTAGGTATCTGTACAGCATCGACTACATGGCTTGG
TTCAGACAGAGCCCCGGCAAGGAGAGGGAGCCAGTGGCTGTCATCTACACTGCC
TCCGGCGCCACATTCTATCCAGATAGCGTGAAGGGAAGGTTCACTATCAGCCAA
GATAACGCCAAGATGACAGTGTATCTGCAGATGAACTCTCTGAAGAGCGAGGAC
ACTGCCATGTACTACTGTGCCGCCGTGAGGAAGACAGATAGCTACCTCTTCGACG
CCCAGAGCTTCACATACTGGGGCCAAGGCACACAAGTGACAGTCTCGAGCGGCG
GAGGATCCCAAGTGCAGCTGCAAGAGAGCGGAGGAGGACTGGTCCAGCCCGGC
GGCTCTCTGAGGCTGAGCTGCACTGCTTCCGGCTTCAGCTTCAGCAGCTACCCTA
TGACATGGGCTAGGCAAGCCCCCGGCAAAGGACTGGAATGGGTGAGCACTATTG
CCAGCGATGGAGGCAGCACAGCCTACGCTGCCAGCGTGGAGGGAAGGTTCACAA
TCTCTAGGGACAATGCCAAGAGCACACTGTATCTGCAGCTGAACTCTCTGAAGAC
AGAGGACACTGCCATGTACTACTGCACTAAGGGCTACGGCGATGGCACACCAGC
TCCCGGCCAAGGCACACAAGTGACTGTCTCGTCTGCTAGCCACCATCACCATCAC
CAC
>SEQ ID NO: 223; DR434(DR235-DR230)
CAAGTGCAGCTGCAAGAGAGCGGAGGAGGAAGCGTGCAAGCCGGAGGCTCTCT
GAGACTGAGCTGTGCCGCCTCTAGGTATCTGTACAGCATCGACTACATGGCTTGG
TTCAGACAGAGCCCCGGCAAGGAGAGGGAGCCAGTGGCTGTCATCTACACTGCC
TCCGGCGCCACATTCTATCCAGATAGCGTGAAGGGAAGGTTCACTATCAGCCAA
GATAACGCCAAGATGACAGTGTATCTGCAGATGAACTCTCTGAAGAGCGAGGAC
ACTGCCATGTACTACTGTGCCGCCGTGAGGAAGACAGATAGCTACCTCTTCGACG
CCCAGAGCTTCACATACTGGGGCCAAGGCACACAAGTGACAGTCTCGAGCGGCG
GAGGATCCCAAGTGCAGCTGCAAGAGAGCGGAGGAGGACTGGTGCAGCCCGGC
GGCTCTCTGAGGCTGAGCTGTGCTGCCAGCGGCTTCACTTTCAGCAGCGCTCACA
TGAGCTGGGTGAGGCAAGCCCCCGGCAAAGGAAGGGAGTGGATCGCCTCCATCT
ACAGCGGCGGCGGAACATTCTACGCCGACAGCGTGAAGGGAAGGTTCACAATCT
CTAGGGACAACGCCAAGAACACACTGTATCTGCAGCTGAACTCTCTGAAGGCCG
AGGACACTGCCATGTACTACTGCGCCACTAATAGGCTGCACTACTACAGCGACG
ATGATTCTCTGAGGGGCCAAGGCACACAAGTGACAGTCTCGTCTGCTAGCCACC
ATCACCATCACCAC
>SEQ ID NO: 224; DR435(DR235-DR231)
CAAGTGCAGCTGCAAGAGAGCGGAGGAGGAAGCGTGCAAGCCGGAGGCTCTCT
GAGACTGAGCTGTGCCGCCTCTAGGTATCTGTACAGCATCGACTACATGGCTTGG
TTCAGACAGAGCCCCGGCAAGGAGAGGGAGCCAGTGGCTGTCATCTACACTGCC
TCCGGCGCCACATTCTATCCAGATAGCGTGAAGGGAAGGTTCACTATCAGCCAA
GATAACGCCAAGATGACAGTGTATCTGCAGATGAACTCTCTGAAGAGCGAGGAC
ACTGCCATGTACTACTGTGCCGCCGTGAGGAAGACAGATAGCTACCTCTTCGACG
CCCAGAGCTTCACATACTGGGGCCAAGGCACACAAGTGACAGTCTCGAGCGGCG
GAGGATCCCAAGTGCAGCTGCAAGAGAGCGGAGGAGGAAGCGTGCAAGCCGGC
GGATCTCTGAGACTCAGCTGTACTGCCTCCGGCTTCACATTCGACGATAGGGAGA
TGAACTGGTATAGGCAAGCCCCCGGCAATGAGTGCGAGCTGGTGAGCACAATCT
CCAGCGATGGCAGCACTTACTACGCCGATAGCGTGAAGGGAAGGTTCACTATCT
CCCAAGATAACGCCAAGAACACAGTCTATCTGCAGATGGACTCCGTCAAGCCAG
AGGATACTGCCGTGTACTACTGCGCCGCCGACTTCATGATCGCCATCCAAGCCCC
CGGCGCTGGCTGTTGGGGACAAGGCACTCAAGTGACAGTCTCGTCTGCTAGCCA
CCATCACCATCACCAC
>SEQ ID NO: 225; DR436(DR235-DR232)
CAAGTGCAGCTGCAAGAGAGCGGAGGAGGAAGCGTGCAAGCCGGAGGCTCTCT
GAGACTGAGCTGTGCCGCCTCTAGGTATCTGTACAGCATCGACTACATGGCTTGG
TTCAGACAGAGCCCCGGCAAGGAGAGGGAGCCAGTGGCTGTCATCTACACTGCC
TCCGGCGCCACATTCTATCCAGATAGCGTGAAGGGAAGGTTCACTATCAGCCAA
GATAACGCCAAGATGACAGTGTATCTGCAGATGAACTCTCTGAAGAGCGAGGAC
ACTGCCATGTACTACTGTGCCGCCGTGAGGAAGACAGATAGCTACCTCTTCGACG
CCCAGAGCTTCACATACTGGGGCCAAGGCACACAAGTGACAGTCTCGAGCGGCG
GAGGATCCCAAGTGCAGCTGCAAGAGAGCGGAGGAGGCAGCGTGCAAGCCGGA
GGCTCTCTGAGACTGAGCTGTGTGGCTAGTGGCTACACAAGCTGCATGGGCTGGT
TTAGGCAAGCCCCCGGCAAGGAGAGAGAGGCCGTGGCCACAATCTACACTAGGG
GAAGGAGCATCTACTACGCCGACAGCGTGAAAGGAAGGTTCACAATCAGCCAAG
ATAACGCCAAGAACACTCTGTATCTGCAGATGAACAGCCTCAAGCCAGAGGACA
TCGCCATGTATAGCTGTGCTGCTGGCGGCTATAGCTGGAGCGCTGGCTGCGAGTT
CAATTACTGGGGCCAAGGCACACAAGTGACTGTCTCGTCTGCTAGCCACCATCAC
CATCACCAC
>SEQ ID NO: 226; DR437(DR235-DR233)
CAAGTGCAGCTGCAAGAGAGCGGAGGAGGAAGCGTGCAAGCCGGAGGCTCTCT
GAGACTGAGCTGTGCCGCCTCTAGGTATCTGTACAGCATCGACTACATGGCTTGG
TTCAGACAGAGCCCCGGCAAGGAGAGGGAGCCAGTGGCTGTCATCTACACTGCC
TCCGGCGCCACATTCTATCCAGATAGCGTGAAGGGAAGGTTCACTATCAGCCAA
GATAACGCCAAGATGACAGTGTATCTGCAGATGAACTCTCTGAAGAGCGAGGAC
ACTGCCATGTACTACTGTGCCGCCGTGAGGAAGACAGATAGCTACCTCTTCGACG
CCCAGAGCTTCACATACTGGGGCCAAGGCACACAAGTGACAGTCTCGAGCGGCG
GAGGATCCCAAGTGCAGCTGCAAGAGAGCGGAGGCGGAAGCGTGCAAGCTGGA
GGATCTCTGAGGCTGAGCTGCACAGCCAGCGGCTTCACTTTCGATGACAGCGAC
ATGGGCTGGTATAGGCAAGCCCCCGGCAATGAGTGTGAGCTGGTGAGCACAATC
AGCAGCGACGGCTCCACTTACTACGCCGACAGCGTCAAGGGAAGGTTCACAATC
AGCCAAGATAACGCCAAGAACACTGTGTATCTGCAGATGAACTCTCTGAAGCCA
GAGGACACAGCCGTGTACTACTGTGCTGCCGAGCCTAGGGGCTACTATAGCAAC
TACGGCGGAAGGAGGGAGTGCAATTACTGGGGCCAAGGCACACAAGTGACAGT
CTCGTCTGCTAGCCACCATCACCATCACCAC
>SEQ ID NO: 227; DR438(DR235-DR234)
CAAGTGCAGCTGCAAGAGAGCGGAGGAGGAAGCGTGCAAGCCGGAGGCTCTCT
GAGACTGAGCTGTGCCGCCTCTAGGTATCTGTACAGCATCGACTACATGGCTTGG
TTCAGACAGAGCCCCGGCAAGGAGAGGGAGCCAGTGGCTGTCATCTACACTGCC
TCCGGCGCCACATTCTATCCAGATAGCGTGAAGGGAAGGTTCACTATCAGCCAA
GATAACGCCAAGATGACAGTGTATCTGCAGATGAACTCTCTGAAGAGCGAGGAC
ACTGCCATGTACTACTGTGCCGCCGTGAGGAAGACAGATAGCTACCTCTTCGACG
CCCAGAGCTTCACATACTGGGGCCAAGGCACACAAGTGACAGTCTCGAGCGGCG
GAGGATCCCAAGTGCAGCTGCAAGAGAGCGGAGGAGGAAGCGTGCAAGCCGGA
GGCTCTCTGAGGCTGAGCTGTGTGGCTAGTGGCTACACTTTCAGCAGCTACTGCA
TGGGCTGGTTCAGACAAGCCCCCGGCAAGGAAAGGGAAGGAGTGGCCGCTCTGG
GCGGAGGAAGCACATACTACGCTGACAGCGTGAAGGGAAGGTTCACAATCAGCC
AAGATAACGCCAAGAACACACTGTATCTGCAGATGAACTCTCTGAAGCCAGAGG
ACACAGCCATGTACTACTGTGCCGCTGCTTGGGTCGCTTGTCTGGAGTTCGGCGG
CAGCTGGTACGATCTGGCTAGGTACAAGCACTGGGGCCAAGGCACACAAGTGAC
AGTCTCGTCTGCTAGCCACCATCACCATCACCAC
>SEQ ID NO: 228; DR439(DR236-DR229)
CAAGTGCAGCTGCAAGAGAGCGGAGGAGGAAGCGTGCAAGCCGGAGGCTCTCT
GAGGCTGAGCTGTGCCGCCTCTAGGTTCACATACAGCAGCTACTGCATGGGCTGG
TTCAGACAAGCCCCCGGCAAAGAGAGAGAAGGCGTGGCCAGCATCGATAGCGAT
GGCTCCACTAGCTACACTGACAGCGTGAAGGGAAGGTTCACTATCAGCAAGGAC
AACGCCAAGAACACTCTGTATCTGCAGATGAACTCTCTGAAGCCAGAGGACACA
GCCATGTACTACTGTGCCCTCGATCTGATGAGCACAGTGGTGCCCGGCTTCTGTG
GCTTTCTGCTGAGCGCTGGCATGGATTACTGGGGCAAGGGCACTCAAGTGACTGT
CTCGAGCGGCGGAGGATCCCAAGTGCAGCTGCAAGAGAGCGGAGGAGGACTGG
TCCAGCCCGGCGGCTCTCTGAGGCTGAGCTGCACTGCTTCCGGCTTCAGCTTCAG
CAGCTACCCTATGACATGGGCTAGGCAAGCCCCCGGCAAAGGACTGGAATGGGT
GAGCACTATTGCCAGCGATGGAGGCAGCACAGCCTACGCTGCCAGCGTGGAGGG
AAGGTTCACAATCTCTAGGGACAATGCCAAGAGCACACTGTATCTGCAGCTGAA
CTCTCTGAAGACAGAGGACACTGCCATGTACTACTGCACTAAGGGCTACGGCGA
TGGCACACCAGCTCCCGGCCAAGGCACACAAGTGACTGTCTCGTCTGCTAGCCAC
CATCACCATCACCAC
>SEQ ID NO: 229; DR440(DR236-DR230)
CAAGTGCAGCTGCAAGAGAGCGGAGGAGGAAGCGTGCAAGCCGGAGGCTCTCT
GAGGCTGAGCTGTGCCGCCTCTAGGTTCACATACAGCAGCTACTGCATGGGCTGG
TTCAGACAAGCCCCCGGCAAAGAGAGAGAAGGCGTGGCCAGCATCGATAGCGAT
GGCTCCACTAGCTACACTGACAGCGTGAAGGGAAGGTTCACTATCAGCAAGGAC
AACGCCAAGAACACTCTGTATCTGCAGATGAACTCTCTGAAGCCAGAGGACACA
GCCATGTACTACTGTGCCCTCGATCTGATGAGCACAGTGGTGCCCGGCTTCTGTG
GCTTTCTGCTGAGCGCTGGCATGGATTACTGGGGCAAGGGCACTCAAGTGACTGT
CTCGAGCGGCGGAGGATCCCAAGTGCAGCTGCAAGAGAGCGGAGGAGGACTGG
TGCAGCCCGGCGGCTCTCTGAGGCTGAGCTGTGCTGCCAGCGGCTTCACTTTCAG
CAGCGCTCACATGAGCTGGGTGAGGCAAGCCCCCGGCAAAGGAAGGGAGTGGA
TCGCCTCCATCTACAGCGGCGGCGGAACATTCTACGCCGACAGCGTGAAGGGAA
GGTTCACAATCTCTAGGGACAACGCCAAGAACACACTGTATCTGCAGCTGAACT
CTCTGAAGGCCGAGGACACTGCCATGTACTACTGCGCCACTAATAGGCTGCACTA
CTACAGCGACGATGATTCTCTGAGGGGCCAAGGCACACAAGTGACAGTCTCGTC
TGCTAGCCACCATCACCATCACCAC
>SEQ ID NO: 230; DR441(DR236-DR231)
CAAGTGCAGCTGCAAGAGAGCGGAGGAGGAAGCGTGCAAGCCGGAGGCTCTCT
GAGGCTGAGCTGTGCCGCCTCTAGGTTCACATACAGCAGCTACTGCATGGGCTGG
TTCAGACAAGCCCCCGGCAAAGAGAGAGAAGGCGTGGCCAGCATCGATAGCGAT
GGCTCCACTAGCTACACTGACAGCGTGAAGGGAAGGTTCACTATCAGCAAGGAC
AACGCCAAGAACACTCTGTATCTGCAGATGAACTCTCTGAAGCCAGAGGACACA
GCCATGTACTACTGTGCCCTCGATCTGATGAGCACAGTGGTGCCCGGCTTCTGTG
GCTTTCTGCTGAGCGCTGGCATGGATTACTGGGGCAAGGGCACTCAAGTGACTGT
CTCGAGCGGCGGAGGATCCCAAGTGCAGCTGCAAGAGAGCGGAGGAGGAAGCG
TGCAAGCCGGCGGATCTCTGAGACTCAGCTGTACTGCCTCCGGCTTCACATTCGA
CGATAGGGAGATGAACTGGTATAGGCAAGCCCCCGGCAATGAGTGCGAGCTGGT
GAGCACAATCTCCAGCGATGGCAGCACTTACTACGCCGATAGCGTGAAGGGAAG
GTTCACTATCTCCCAAGATAACGCCAAGAACACAGTCTATCTGCAGATGGACTCC
GTCAAGCCAGAGGATACTGCCGTGTACTACTGCGCCGCCGACTTCATGATCGCCA
TCCAAGCCCCCGGCGCTGGCTGTTGGGGACAAGGCACTCAAGTGACAGTCTCGT
CTGCTAGCCACCATCACCATCACCAC
>SEQ ID NO: 231; DR442(DR236-DR232)
CAAGTGCAGCTGCAAGAGAGCGGAGGAGGAAGCGTGCAAGCCGGAGGCTCTCT
GAGGCTGAGCTGTGCCGCCTCTAGGTTCACATACAGCAGCTACTGCATGGGCTGG
TTCAGACAAGCCCCCGGCAAAGAGAGAGAAGGCGTGGCCAGCATCGATAGCGAT
GGCTCCACTAGCTACACTGACAGCGTGAAGGGAAGGTTCACTATCAGCAAGGAC
AACGCCAAGAACACTCTGTATCTGCAGATGAACTCTCTGAAGCCAGAGGACACA
GCCATGTACTACTGTGCCCTCGATCTGATGAGCACAGTGGTGCCCGGCTTCTGTG
GCTTTCTGCTGAGCGCTGGCATGGATTACTGGGGCAAGGGCACTCAAGTGACTGT
CTCGAGCGGCGGAGGATCCCAAGTGCAGCTGCAAGAGAGCGGAGGAGGCAGCG
TGCAAGCCGGAGGCTCTCTGAGACTGAGCTGTGTGGCTAGTGGCTACACAAGCT
GCATGGGCTGGTTTAGGCAAGCCCCCGGCAAGGAGAGAGAGGCCGTGGCCACAA
TCTACACTAGGGGAAGGAGCATCTACTACGCCGACAGCGTGAAAGGAAGGTTCA
CAATCAGCCAAGATAACGCCAAGAACACTCTGTATCTGCAGATGAACAGCCTCA
AGCCAGAGGACATCGCCATGTATAGCTGTGCTGCTGGCGGCTATAGCTGGAGCG
CTGGCTGCGAGTTCAATTACTGGGGCCAAGGCACACAAGTGACTGTCTCGTCTGC
TAGCCACCATCACCATCACCAC
>SEQ ID NO: 232; DR443(DR236-DR233)
CAAGTGCAGCTGCAAGAGAGCGGAGGAGGAAGCGTGCAAGCCGGAGGCTCTCT
GAGGCTGAGCTGTGCCGCCTCTAGGTTCACATACAGCAGCTACTGCATGGGCTGG
TTCAGACAAGCCCCCGGCAAAGAGAGAGAAGGCGTGGCCAGCATCGATAGCGAT
GGCTCCACTAGCTACACTGACAGCGTGAAGGGAAGGTTCACTATCAGCAAGGAC
AACGCCAAGAACACTCTGTATCTGCAGATGAACTCTCTGAAGCCAGAGGACACA
GCCATGTACTACTGTGCCCTCGATCTGATGAGCACAGTGGTGCCCGGCTTCTGTG
GCTTTCTGCTGAGCGCTGGCATGGATTACTGGGGCAAGGGCACTCAAGTGACTGT
CTCGAGCGGCGGAGGATCCCAAGTGCAGCTGCAAGAGAGCGGAGGCGGAAGCG
TGCAAGCTGGAGGATCTCTGAGGCTGAGCTGCACAGCCAGCGGCTTCACTTTCGA
TGACAGCGACATGGGCTGGTATAGGCAAGCCCCCGGCAATGAGTGTGAGCTGGT
GAGCACAATCAGCAGCGACGGCTCCACTTACTACGCCGACAGCGTCAAGGGAAG
GTTCACAATCAGCCAAGATAACGCCAAGAACACTGTGTATCTGCAGATGAACTC
TCTGAAGCCAGAGGACACAGCCGTGTACTACTGTGCTGCCGAGCCTAGGGGCTA
CTATAGCAACTACGGCGGAAGGAGGGAGTGCAATTACTGGGGCCAAGGCACACA
AGTGACAGTCTCGTCTGCTAGCCACCATCACCATCACCAC
>SEQ ID NO: 233; DR444(DR236-DR234)
CAAGTGCAGCTGCAAGAGAGCGGAGGAGGAAGCGTGCAAGCCGGAGGCTCTCT
GAGGCTGAGCTGTGCCGCCTCTAGGTTCACATACAGCAGCTACTGCATGGGCTGG
TTCAGACAAGCCCCCGGCAAAGAGAGAGAAGGCGTGGCCAGCATCGATAGCGAT
GGCTCCACTAGCTACACTGACAGCGTGAAGGGAAGGTTCACTATCAGCAAGGAC
AACGCCAAGAACACTCTGTATCTGCAGATGAACTCTCTGAAGCCAGAGGACACA
GCCATGTACTACTGTGCCCTCGATCTGATGAGCACAGTGGTGCCCGGCTTCTGTG
GCTTTCTGCTGAGCGCTGGCATGGATTACTGGGGCAAGGGCACTCAAGTGACTGT
CTCGAGCGGCGGAGGATCCCAAGTGCAGCTGCAAGAGAGCGGAGGAGGAAGCG
TGCAAGCCGGAGGCTCTCTGAGGCTGAGCTGTGTGGCTAGTGGCTACACTTTCAG
CAGCTACTGCATGGGCTGGTTCAGACAAGCCCCCGGCAAGGAAAGGGAAGGAGT
GGCCGCTCTGGGCGGAGGAAGCACATACTACGCTGACAGCGTGAAGGGAAGGTT
CACAATCAGCCAAGATAACGCCAAGAACACACTGTATCTGCAGATGAACTCTCT
GAAGCCAGAGGACACAGCCATGTACTACTGTGCCGCTGCTTGGGTCGCTTGTCTG
GAGTTCGGCGGCAGCTGGTACGATCTGGCTAGGTACAAGCACTGGGGCCAAGGC
ACACAAGTGACAGTCTCGTCTGCTAGCCACCATCACCATCACCAC
>SEQ ID NO: 234; DR445(DR237-DR229)
CAAGTGCAGCTGCAAGAGTCCGGAGGAGGCAGCGTCCAAGCCGGAGGCTCTCTG
AGGCTGAGCTGTGCTGCCAGCGGCTACACTTACAGCATGTACTGCATGGGCTGGT
TCAGACAAGCCCCCGGCAAGGAAAGAGAGGGCGTGGCCCAGATCAATAGCGAT
GGCAGCACAAGCTACGCCGACAGCGTGAAGGGAAGGTTCACTATCTCCAAGGAC
AACGCCAAGAACACTCTGTATCTGCAGATGAACTCTCTGAAGCCAGAGGACACT
GCCATGTACTACTGCGCTGCCGATTCTAGGGTGTACGGCGGCAGCTGGTATGAGA
GGCTCTGCGGCCCTTACACATACGAGTACAACTACTGGGGCCAAGGCACACAAG
TGACTGTCTCGAGCGGCGGAGGATCCCAAGTGCAGCTGCAAGAGAGCGGAGGAG
GACTGGTCCAGCCCGGCGGCTCTCTGAGGCTGAGCTGCACTGCTTCCGGCTTCAG
CTTCAGCAGCTACCCTATGACATGGGCTAGGCAAGCCCCCGGCAAAGGACTGGA
ATGGGTGAGCACTATTGCCAGCGATGGAGGCAGCACAGCCTACGCTGCCAGCGT
GGAGGGAAGGTTCACAATCTCTAGGGACAATGCCAAGAGCACACTGTATCTGCA
GCTGAACTCTCTGAAGACAGAGGACACTGCCATGTACTACTGCACTAAGGGCTA
CGGCGATGGCACACCAGCTCCCGGCCAAGGCACACAAGTGACTGTCTCGTCTGC
TAGCCACCATCACCATCACCAC
>SEQ ID NO: 235; DR446(DR237-DR230)
CAAGTGCAGCTGCAAGAGTCCGGAGGAGGCAGCGTCCAAGCCGGAGGCTCTCTG
AGGCTGAGCTGTGCTGCCAGCGGCTACACTTACAGCATGTACTGCATGGGCTGGT
TCAGACAAGCCCCCGGCAAGGAAAGAGAGGGCGTGGCCCAGATCAATAGCGAT
GGCAGCACAAGCTACGCCGACAGCGTGAAGGGAAGGTTCACTATCTCCAAGGAC
AACGCCAAGAACACTCTGTATCTGCAGATGAACTCTCTGAAGCCAGAGGACACT
GCCATGTACTACTGCGCTGCCGATTCTAGGGTGTACGGCGGCAGCTGGTATGAGA
GGCTCTGCGGCCCTTACACATACGAGTACAACTACTGGGGCCAAGGCACACAAG
TGACTGTCTCGAGCGGCGGAGGATCCCAAGTGCAGCTGCAAGAGAGCGGAGGAG
GACTGGTGCAGCCCGGCGGCTCTCTGAGGCTGAGCTGTGCTGCCAGCGGCTTCAC
TTTCAGCAGCGCTCACATGAGCTGGGTGAGGCAAGCCCCCGGCAAAGGAAGGGA
GTGGATCGCCTCCATCTACAGCGGCGGCGGAACATTCTACGCCGACAGCGTGAA
GGGAAGGTTCACAATCTCTAGGGACAACGCCAAGAACACACTGTATCTGCAGCT
GAACTCTCTGAAGGCCGAGGACACTGCCATGTACTACTGCGCCACTAATAGGCT
GCACTACTACAGCGACGATGATTCTCTGAGGGGCCAAGGCACACAAGTGACAGT
CTCGTCTGCTAGCCACCATCACCATCACCAC
>SEQ ID NO: 236; DR447(DR237-DR231)
CAAGTGCAGCTGCAAGAGTCCGGAGGAGGCAGCGTCCAAGCCGGAGGCTCTCTG
AGGCTGAGCTGTGCTGCCAGCGGCTACACTTACAGCATGTACTGCATGGGCTGGT
TCAGACAAGCCCCCGGCAAGGAAAGAGAGGGCGTGGCCCAGATCAATAGCGAT
GGCAGCACAAGCTACGCCGACAGCGTGAAGGGAAGGTTCACTATCTCCAAGGAC
AACGCCAAGAACACTCTGTATCTGCAGATGAACTCTCTGAAGCCAGAGGACACT
GCCATGTACTACTGCGCTGCCGATTCTAGGGTGTACGGCGGCAGCTGGTATGAGA
GGCTCTGCGGCCCTTACACATACGAGTACAACTACTGGGGCCAAGGCACACAAG
TGACTGTCTCGAGCGGCGGAGGATCCCAAGTGCAGCTGCAAGAGAGCGGAGGAG
GAAGCGTGCAAGCCGGCGGATCTCTGAGACTCAGCTGTACTGCCTCCGGCTTCAC
ATTCGACGATAGGGAGATGAACTGGTATAGGCAAGCCCCCGGCAATGAGTGCGA
GCTGGTGAGCACAATCTCCAGCGATGGCAGCACTTACTACGCCGATAGCGTGAA
GGGAAGGTTCACTATCTCCCAAGATAACGCCAAGAACACAGTCTATCTGCAGAT
GGACTCCGTCAAGCCAGAGGATACTGCCGTGTACTACTGCGCCGCCGACTTCATG
ATCGCCATCCAAGCCCCCGGCGCTGGCTGTTGGGGACAAGGCACTCAAGTGACA
GTCTCGTCTGCTAGCCACCATCACCATCACCAC
>SEQ ID NO: 237; DR448(DR237-DR232)
CAAGTGCAGCTGCAAGAGTCCGGAGGAGGCAGCGTCCAAGCCGGAGGCTCTCTG
AGGCTGAGCTGTGCTGCCAGCGGCTACACTTACAGCATGTACTGCATGGGCTGGT
TCAGACAAGCCCCCGGCAAGGAAAGAGAGGGCGTGGCCCAGATCAATAGCGAT
GGCAGCACAAGCTACGCCGACAGCGTGAAGGGAAGGTTCACTATCTCCAAGGAC
AACGCCAAGAACACTCTGTATCTGCAGATGAACTCTCTGAAGCCAGAGGACACT
GCCATGTACTACTGCGCTGCCGATTCTAGGGTGTACGGCGGCAGCTGGTATGAGA
GGCTCTGCGGCCCTTACACATACGAGTACAACTACTGGGGCCAAGGCACACAAG
TGACTGTCTCGAGCGGCGGAGGATCCCAAGTGCAGCTGCAAGAGAGCGGAGGAG
GCAGCGTGCAAGCCGGAGGCTCTCTGAGACTGAGCTGTGTGGCTAGTGGCTACA
CAAGCTGCATGGGCTGGTTTAGGCAAGCCCCCGGCAAGGAGAGAGAGGCCGTGG
CCACAATCTACACTAGGGGAAGGAGCATCTACTACGCCGACAGCGTGAAAGGAA
GGTTCACAATCAGCCAAGATAACGCCAAGAACACTCTGTATCTGCAGATGAACA
GCCTCAAGCCAGAGGACATCGCCATGTATAGCTGTGCTGCTGGCGGCTATAGCTG
GAGCGCTGGCTGCGAGTTCAATTACTGGGGCCAAGGCACACAAGTGACTGTCTC
GTCTGCTAGCCACCATCACCATCACCAC
>SEQ ID NO: 238; DR449(DR237-DR233)
CAAGTGCAGCTGCAAGAGTCCGGAGGAGGCAGCGTCCAAGCCGGAGGCTCTCTG
AGGCTGAGCTGTGCTGCCAGCGGCTACACTTACAGCATGTACTGCATGGGCTGGT
TCAGACAAGCCCCCGGCAAGGAAAGAGAGGGCGTGGCCCAGATCAATAGCGAT
GGCAGCACAAGCTACGCCGACAGCGTGAAGGGAAGGTTCACTATCTCCAAGGAC
AACGCCAAGAACACTCTGTATCTGCAGATGAACTCTCTGAAGCCAGAGGACACT
GCCATGTACTACTGCGCTGCCGATTCTAGGGTGTACGGCGGCAGCTGGTATGAGA
GGCTCTGCGGCCCTTACACATACGAGTACAACTACTGGGGCCAAGGCACACAAG
TGACTGTCTCGAGCGGCGGAGGATCCCAAGTGCAGCTGCAAGAGAGCGGAGGCG
GAAGCGTGCAAGCTGGAGGATCTCTGAGGCTGAGCTGCACAGCCAGCGGCTTCA
CTTTCGATGACAGCGACATGGGCTGGTATAGGCAAGCCCCCGGCAATGAGTGTG
AGCTGGTGAGCACAATCAGCAGCGACGGCTCCACTTACTACGCCGACAGCGTCA
AGGGAAGGTTCACAATCAGCCAAGATAACGCCAAGAACACTGTGTATCTGCAGA
TGAACTCTCTGAAGCCAGAGGACACAGCCGTGTACTACTGTGCTGCCGAGCCTA
GGGGCTACTATAGCAACTACGGCGGAAGGAGGGAGTGCAATTACTGGGGCCAAG
GCACACAAGTGACAGTCTCGTCTGCTAGCCACCATCACCATCACCAC
>SEQ ID NO: 239; DR450(DR237-DR234)
CAAGTGCAGCTGCAAGAGTCCGGAGGAGGCAGCGTCCAAGCCGGAGGCTCTCTG
AGGCTGAGCTGTGCTGCCAGCGGCTACACTTACAGCATGTACTGCATGGGCTGGT
TCAGACAAGCCCCCGGCAAGGAAAGAGAGGGCGTGGCCCAGATCAATAGCGAT
GGCAGCACAAGCTACGCCGACAGCGTGAAGGGAAGGTTCACTATCTCCAAGGAC
AACGCCAAGAACACTCTGTATCTGCAGATGAACTCTCTGAAGCCAGAGGACACT
GCCATGTACTACTGCGCTGCCGATTCTAGGGTGTACGGCGGCAGCTGGTATGAGA
GGCTCTGCGGCCCTTACACATACGAGTACAACTACTGGGGCCAAGGCACACAAG
TGACTGTCTCGAGCGGCGGAGGATCCCAAGTGCAGCTGCAAGAGAGCGGAGGAG
GAAGCGTGCAAGCCGGAGGCTCTCTGAGGCTGAGCTGTGTGGCTAGTGGCTACA
CTTTCAGCAGCTACTGCATGGGCTGGTTCAGACAAGCCCCCGGCAAGGAAAGGG
AAGGAGTGGCCGCTCTGGGCGGAGGAAGCACATACTACGCTGACAGCGTGAAGG
GAAGGTTCACAATCAGCCAAGATAACGCCAAGAACACACTGTATCTGCAGATGA
ACTCTCTGAAGCCAGAGGACACAGCCATGTACTACTGTGCCGCTGCTTGGGTCGC
TTGTCTGGAGTTCGGCGGCAGCTGGTACGATCTGGCTAGGTACAAGCACTGGGG
CCAAGGCACACAAGTGACAGTCTCGTCTGCTAGCCACCATCACCATCACCAC
>SEQ ID NO: 240; DR451(DR238-DR229)
CAAGTGCAGCTGCAAGAGAGCGGCGGAGGAAGCGTGCAAGCCGGAGGATCTCT
GAGACTGAGCTGCGCTGTGAGCGGCTACGCCTACTCCACATACTGCATGGGCTG
GTTTAGGCAAGCCCCCGGCAAAGAGAGAGAGGGCGTGGCTGCTATCGATAGCGG
CGGCAGCACAAGCTACGCCGATAGCGTGAAGGGAAGGTTCACAATCAGCAAGG
ACAACGCCAAGAACACACTGTATCTGAGGATGAACTCTCTGAAGCCAGAGGACA
CAGCCATGTACTACTGTGCTGCTGTGCCTCCTCCTCCAGATGGCGGCAGCTGTCT
GTTTCTGGGACCAGAGATCAAGGTCAGCAAGGCCGATTTTAGGTACTGGGGCCA
AGGCACACAAGTGACAGTCTCGAGCGGCGGAGGATCCCAAGTGCAGCTGCAAGA
GAGCGGAGGAGGACTGGTCCAGCCCGGCGGCTCTCTGAGGCTGAGCTGCACTGC
TTCCGGCTTCAGCTTCAGCAGCTACCCTATGACATGGGCTAGGCAAGCCCCCGGC
AAAGGACTGGAATGGGTGAGCACTATTGCCAGCGATGGAGGCAGCACAGCCTAC
GCTGCCAGCGTGGAGGGAAGGTTCACAATCTCTAGGGACAATGCCAAGAGCACA
CTGTATCTGCAGCTGAACTCTCTGAAGACAGAGGACACTGCCATGTACTACTGCA
CTAAGGGCTACGGCGATGGCACACCAGCTCCCGGCCAAGGCACACAAGTGACTG
TCTCGTCTGCTAGCCACCATCACCATCACCAC
>SEQ ID NO: 241; DR452(DR238-DR230)
CAAGTGCAGCTGCAAGAGAGCGGCGGAGGAAGCGTGCAAGCCGGAGGATCTCT
GAGACTGAGCTGCGCTGTGAGCGGCTACGCCTACTCCACATACTGCATGGGCTG
GTTTAGGCAAGCCCCCGGCAAAGAGAGAGAGGGCGTGGCTGCTATCGATAGCGG
CGGCAGCACAAGCTACGCCGATAGCGTGAAGGGAAGGTTCACAATCAGCAAGG
ACAACGCCAAGAACACACTGTATCTGAGGATGAACTCTCTGAAGCCAGAGGACA
CAGCCATGTACTACTGTGCTGCTGTGCCTCCTCCTCCAGATGGCGGCAGCTGTCT
GTTTCTGGGACCAGAGATCAAGGTCAGCAAGGCCGATTTTAGGTACTGGGGCCA
AGGCACACAAGTGACAGTCTCGAGCGGCGGAGGATCCCAAGTGCAGCTGCAAGA
GAGCGGAGGAGGACTGGTGCAGCCCGGCGGCTCTCTGAGGCTGAGCTGTGCTGC
CAGCGGCTTCACTTTCAGCAGCGCTCACATGAGCTGGGTGAGGCAAGCCCCCGG
CAAAGGAAGGGAGTGGATCGCCTCCATCTACAGCGGCGGCGGAACATTCTACGC
CGACAGCGTGAAGGGAAGGTTCACAATCTCTAGGGACAACGCCAAGAACACACT
GTATCTGCAGCTGAACTCTCTGAAGGCCGAGGACACTGCCATGTACTACTGCGCC
ACTAATAGGCTGCACTACTACAGCGACGATGATTCTCTGAGGGGCCAAGGCACA
CAAGTGACAGTCTCGTCTGCTAGCCACCATCACCATCACCAC
>SEQ ID NO: 242; DR453(DR238-DR231)
CAAGTGCAGCTGCAAGAGAGCGGCGGAGGAAGCGTGCAAGCCGGAGGATCTCT
GAGACTGAGCTGCGCTGTGAGCGGCTACGCCTACTCCACATACTGCATGGGCTG
GTTTAGGCAAGCCCCCGGCAAAGAGAGAGAGGGCGTGGCTGCTATCGATAGCGG
CGGCAGCACAAGCTACGCCGATAGCGTGAAGGGAAGGTTCACAATCAGCAAGG
ACAACGCCAAGAACACACTGTATCTGAGGATGAACTCTCTGAAGCCAGAGGACA
CAGCCATGTACTACTGTGCTGCTGTGCCTCCTCCTCCAGATGGCGGCAGCTGTCT
GTTTCTGGGACCAGAGATCAAGGTCAGCAAGGCCGATTTTAGGTACTGGGGCCA
AGGCACACAAGTGACAGTCTCGAGCGGCGGAGGATCCCAAGTGCAGCTGCAAGA
GAGCGGAGGAGGAAGCGTGCAAGCCGGCGGATCTCTGAGACTCAGCTGTACTGC
CTCCGGCTTCACATTCGACGATAGGGAGATGAACTGGTATAGGCAAGCCCCCGG
CAATGAGTGCGAGCTGGTGAGCACAATCTCCAGCGATGGCAGCACTTACTACGC
CGATAGCGTGAAGGGAAGGTTCACTATCTCCCAAGATAACGCCAAGAACACAGT
CTATCTGCAGATGGACTCCGTCAAGCCAGAGGATACTGCCGTGTACTACTGCGCC
GCCGACTTCATGATCGCCATCCAAGCCCCCGGCGCTGGCTGTTGGGGACAAGGC
ACTCAAGTGACAGTCTCGTCTGCTAGCCACCATCACCATCACCAC
>SEQ ID NO: 243; DR454(DR238-DR232)
CAAGTGCAGCTGCAAGAGAGCGGCGGAGGAAGCGTGCAAGCCGGAGGATCTCT
GAGACTGAGCTGCGCTGTGAGCGGCTACGCCTACTCCACATACTGCATGGGCTG
GTTTAGGCAAGCCCCCGGCAAAGAGAGAGAGGGCGTGGCTGCTATCGATAGCGG
CGGCAGCACAAGCTACGCCGATAGCGTGAAGGGAAGGTTCACAATCAGCAAGG
ACAACGCCAAGAACACACTGTATCTGAGGATGAACTCTCTGAAGCCAGAGGACA
CAGCCATGTACTACTGTGCTGCTGTGCCTCCTCCTCCAGATGGCGGCAGCTGTCT
GTTTCTGGGACCAGAGATCAAGGTCAGCAAGGCCGATTTTAGGTACTGGGGCCA
AGGCACACAAGTGACAGTCTCGAGCGGCGGAGGATCCCAAGTGCAGCTGCAAGA
GAGCGGAGGAGGCAGCGTGCAAGCCGGAGGCTCTCTGAGACTGAGCTGTGTGGC
TAGTGGCTACACAAGCTGCATGGGCTGGTTTAGGCAAGCCCCCGGCAAGGAGAG
AGAGGCCGTGGCCACAATCTACACTAGGGGAAGGAGCATCTACTACGCCGACAG
CGTGAAAGGAAGGTTCACAATCAGCCAAGATAACGCCAAGAACACTCTGTATCT
GCAGATGAACAGCCTCAAGCCAGAGGACATCGCCATGTATAGCTGTGCTGCTGG
CGGCTATAGCTGGAGCGCTGGCTGCGAGTTCAATTACTGGGGCCAAGGCACACA
AGTGACTGTCTCGTCTGCTAGCCACCATCACCATCACCAC
>SEQ ID NO: 244; DR455(DR238-DR233)
CAAGTGCAGCTGCAAGAGAGCGGCGGAGGAAGCGTGCAAGCCGGAGGATCTCT
GAGACTGAGCTGCGCTGTGAGCGGCTACGCCTACTCCACATACTGCATGGGCTG
GTTTAGGCAAGCCCCCGGCAAAGAGAGAGAGGGCGTGGCTGCTATCGATAGCGG
CGGCAGCACAAGCTACGCCGATAGCGTGAAGGGAAGGTTCACAATCAGCAAGG
ACAACGCCAAGAACACACTGTATCTGAGGATGAACTCTCTGAAGCCAGAGGACA
CAGCCATGTACTACTGTGCTGCTGTGCCTCCTCCTCCAGATGGCGGCAGCTGTCT
GTTTCTGGGACCAGAGATCAAGGTCAGCAAGGCCGATTTTAGGTACTGGGGCCA
AGGCACACAAGTGACAGTCTCGAGCGGCGGAGGATCCCAAGTGCAGCTGCAAGA
GAGCGGAGGCGGAAGCGTGCAAGCTGGAGGATCTCTGAGGCTGAGCTGCACAGC
CAGCGGCTTCACTTTCGATGACAGCGACATGGGCTGGTATAGGCAAGCCCCCGG
CAATGAGTGTGAGCTGGTGAGCACAATCAGCAGCGACGGCTCCACTTACTACGC
CGACAGCGTCAAGGGAAGGTTCACAATCAGCCAAGATAACGCCAAGAACACTGT
GTATCTGCAGATGAACTCTCTGAAGCCAGAGGACACAGCCGTGTACTACTGTGCT
GCCGAGCCTAGGGGCTACTATAGCAACTACGGCGGAAGGAGGGAGTGCAATTAC
TGGGGCCAAGGCACACAAGTGACAGTCTCGTCTGCTAGCCACCATCACCATCAC
CAC
>SEQ ID NO: 245; DR456(DR238-DR234)
CAAGTGCAGCTGCAAGAGAGCGGCGGAGGAAGCGTGCAAGCCGGAGGATCTCT
GAGACTGAGCTGCGCTGTGAGCGGCTACGCCTACTCCACATACTGCATGGGCTG
GTTTAGGCAAGCCCCCGGCAAAGAGAGAGAGGGCGTGGCTGCTATCGATAGCGG
CGGCAGCACAAGCTACGCCGATAGCGTGAAGGGAAGGTTCACAATCAGCAAGG
ACAACGCCAAGAACACACTGTATCTGAGGATGAACTCTCTGAAGCCAGAGGACA
CAGCCATGTACTACTGTGCTGCTGTGCCTCCTCCTCCAGATGGCGGCAGCTGTCT
GTTTCTGGGACCAGAGATCAAGGTCAGCAAGGCCGATTTTAGGTACTGGGGCCA
AGGCACACAAGTGACAGTCTCGAGCGGCGGAGGATCCCAAGTGCAGCTGCAAGA
GAGCGGAGGAGGAAGCGTGCAAGCCGGAGGCTCTCTGAGGCTGAGCTGTGTGGC
TAGTGGCTACACTTTCAGCAGCTACTGCATGGGCTGGTTCAGACAAGCCCCCGGC
AAGGAAAGGGAAGGAGTGGCCGCTCTGGGCGGAGGAAGCACATACTACGCTGA
CAGCGTGAAGGGAAGGTTCACAATCAGCCAAGATAACGCCAAGAACACACTGTA
TCTGCAGATGAACTCTCTGAAGCCAGAGGACACAGCCATGTACTACTGTGCCGCT
GCTTGGGTCGCTTGTCTGGAGTTCGGCGGCAGCTGGTACGATCTGGCTAGGTACA
AGCACTGGGGCCAAGGCACACAAGTGACAGTCTCGTCTGCTAGCCACCATCACC
ATCACCAC
>SEQ ID NO: 246; DR457(DR239-DR229)
CAAGTGCAGCTGCAAGAGAGCGGAGGAGGAAGCGTGCAAGCCGGAGGCTCTCT
GAGGCTGAGCTGTACAGTGTCCGGCTACACTTACAGCTCCAATTGCATGGGCTGG
TTTAGGCAAGCCCCCGGCAAGGAAAGAGAGGGCGTGGCCACTATCTACACTGGC
GGCGGCAACACATACTACGCCGATAGCGTGAAGGGAAGGTTCACTATCAGCCAA
GATAACGCCAAGAACACAGTGTATCTGCAGATGAACAATCTGAAGCCAGAGGAC
ACTGCCATGTACTACTGTGCTGCTGAGCCACTGTCTAGGGTGTACGGCGGCAGCT
GCCCAACTCCTACATTCGACTACTGGGGCCAAGGCACACAAGTGACTGTCTCGA
GCGGCGGAGGATCCCAAGTGCAGCTGCAAGAGAGCGGAGGAGGACTGGTCCAG
CCCGGCGGCTCTCTGAGGCTGAGCTGCACTGCTTCCGGCTTCAGCTTCAGCAGCT
ACCCTATGACATGGGCTAGGCAAGCCCCCGGCAAAGGACTGGAATGGGTGAGCA
CTATTGCCAGCGATGGAGGCAGCACAGCCTACGCTGCCAGCGTGGAGGGAAGGT
TCACAATCTCTAGGGACAATGCCAAGAGCACACTGTATCTGCAGCTGAACTCTCT
GAAGACAGAGGACACTGCCATGTACTACTGCACTAAGGGCTACGGCGATGGCAC
ACCAGCTCCCGGCCAAGGCACACAAGTGACTGTCTCGTCTGCTAGCCACCATCAC
CATCACCAC
>SEQ ID NO: 247; DR458(DR239-DR230)
CAAGTGCAGCTGCAAGAGAGCGGAGGAGGAAGCGTGCAAGCCGGAGGCTCTCT
GAGGCTGAGCTGTACAGTGTCCGGCTACACTTACAGCTCCAATTGCATGGGCTGG
TTTAGGCAAGCCCCCGGCAAGGAAAGAGAGGGCGTGGCCACTATCTACACTGGC
GGCGGCAACACATACTACGCCGATAGCGTGAAGGGAAGGTTCACTATCAGCCAA
GATAACGCCAAGAACACAGTGTATCTGCAGATGAACAATCTGAAGCCAGAGGAC
ACTGCCATGTACTACTGTGCTGCTGAGCCACTGTCTAGGGTGTACGGCGGCAGCT
GCCCAACTCCTACATTCGACTACTGGGGCCAAGGCACACAAGTGACTGTCTCGA
GCGGCGGAGGATCCCAAGTGCAGCTGCAAGAGAGCGGAGGAGGACTGGTGCAG
CCCGGCGGCTCTCTGAGGCTGAGCTGTGCTGCCAGCGGCTTCACTTTCAGCAGCG
CTCACATGAGCTGGGTGAGGCAAGCCCCCGGCAAAGGAAGGGAGTGGATCGCCT
CCATCTACAGCGGCGGCGGAACATTCTACGCCGACAGCGTGAAGGGAAGGTTCA
CAATCTCTAGGGACAACGCCAAGAACACACTGTATCTGCAGCTGAACTCTCTGA
AGGCCGAGGACACTGCCATGTACTACTGCGCCACTAATAGGCTGCACTACTACA
GCGACGATGATTCTCTGAGGGGCCAAGGCACACAAGTGACAGTCTCGTCTGCTA
GCCACCATCACCATCACCAC
>SEQ ID NO: 248; DR459(DR239-DR231)
CAAGTGCAGCTGCAAGAGAGCGGAGGAGGAAGCGTGCAAGCCGGAGGCTCTCT
GAGGCTGAGCTGTACAGTGTCCGGCTACACTTACAGCTCCAATTGCATGGGCTGG
TTTAGGCAAGCCCCCGGCAAGGAAAGAGAGGGCGTGGCCACTATCTACACTGGC
GGCGGCAACACATACTACGCCGATAGCGTGAAGGGAAGGTTCACTATCAGCCAA
GATAACGCCAAGAACACAGTGTATCTGCAGATGAACAATCTGAAGCCAGAGGAC
ACTGCCATGTACTACTGTGCTGCTGAGCCACTGTCTAGGGTGTACGGCGGCAGCT
GCCCAACTCCTACATTCGACTACTGGGGCCAAGGCACACAAGTGACTGTCTCGA
GCGGCGGAGGATCCCAAGTGCAGCTGCAAGAGAGCGGAGGAGGAAGCGTGCAA
GCCGGCGGATCTCTGAGACTCAGCTGTACTGCCTCCGGCTTCACATTCGACGATA
GGGAGATGAACTGGTATAGGCAAGCCCCCGGCAATGAGTGCGAGCTGGTGAGCA
CAATCTCCAGCGATGGCAGCACTTACTACGCCGATAGCGTGAAGGGAAGGTTCA
CTATCTCCCAAGATAACGCCAAGAACACAGTCTATCTGCAGATGGACTCCGTCAA
GCCAGAGGATACTGCCGTGTACTACTGCGCCGCCGACTTCATGATCGCCATCCAA
GCCCCCGGCGCTGGCTGTTGGGGACAAGGCACTCAAGTGACAGTCTCGTCTGCTA
GCCACCATCACCATCACCAC
>SEQ ID NO: 249; DR460(DR239-DR232)
CAAGTGCAGCTGCAAGAGAGCGGAGGAGGAAGCGTGCAAGCCGGAGGCTCTCT
GAGGCTGAGCTGTACAGTGTCCGGCTACACTTACAGCTCCAATTGCATGGGCTGG
TTTAGGCAAGCCCCCGGCAAGGAAAGAGAGGGCGTGGCCACTATCTACACTGGC
GGCGGCAACACATACTACGCCGATAGCGTGAAGGGAAGGTTCACTATCAGCCAA
GATAACGCCAAGAACACAGTGTATCTGCAGATGAACAATCTGAAGCCAGAGGAC
ACTGCCATGTACTACTGTGCTGCTGAGCCACTGTCTAGGGTGTACGGCGGCAGCT
GCCCAACTCCTACATTCGACTACTGGGGCCAAGGCACACAAGTGACTGTCTCGA
GCGGCGGAGGATCCCAAGTGCAGCTGCAAGAGAGCGGAGGAGGCAGCGTGCAA
GCCGGAGGCTCTCTGAGACTGAGCTGTGTGGCTAGTGGCTACACAAGCTGCATG
GGCTGGTTTAGGCAAGCCCCCGGCAAGGAGAGAGAGGCCGTGGCCACAATCTAC
ACTAGGGGAAGGAGCATCTACTACGCCGACAGCGTGAAAGGAAGGTTCACAATC
AGCCAAGATAACGCCAAGAACACTCTGTATCTGCAGATGAACAGCCTCAAGCCA
GAGGACATCGCCATGTATAGCTGTGCTGCTGGCGGCTATAGCTGGAGCGCTGGCT
GCGAGTTCAATTACTGGGGCCAAGGCACACAAGTGACTGTCTCGTCTGCTAGCCA
CCATCACCATCACCAC
>SEQ ID NO: 250; DR461(DR239-DR233)
CAAGTGCAGCTGCAAGAGAGCGGAGGAGGAAGCGTGCAAGCCGGAGGCTCTCT
GAGGCTGAGCTGTACAGTGTCCGGCTACACTTACAGCTCCAATTGCATGGGCTGG
TTTAGGCAAGCCCCCGGCAAGGAAAGAGAGGGCGTGGCCACTATCTACACTGGC
GGCGGCAACACATACTACGCCGATAGCGTGAAGGGAAGGTTCACTATCAGCCAA
GATAACGCCAAGAACACAGTGTATCTGCAGATGAACAATCTGAAGCCAGAGGAC
ACTGCCATGTACTACTGTGCTGCTGAGCCACTGTCTAGGGTGTACGGCGGCAGCT
GCCCAACTCCTACATTCGACTACTGGGGCCAAGGCACACAAGTGACTGTCTCGA
GCGGCGGAGGATCCCAAGTGCAGCTGCAAGAGAGCGGAGGCGGAAGCGTGCAA
GCTGGAGGATCTCTGAGGCTGAGCTGCACAGCCAGCGGCTTCACTTTCGATGACA
GCGACATGGGCTGGTATAGGCAAGCCCCCGGCAATGAGTGTGAGCTGGTGAGCA
CAATCAGCAGCGACGGCTCCACTTACTACGCCGACAGCGTCAAGGGAAGGTTCA
CAATCAGCCAAGATAACGCCAAGAACACTGTGTATCTGCAGATGAACTCTCTGA
AGCCAGAGGACACAGCCGTGTACTACTGTGCTGCCGAGCCTAGGGGCTACTATA
GCAACTACGGCGGAAGGAGGGAGTGCAATTACTGGGGCCAAGGCACACAAGTG
ACAGTCTCGTCTGCTAGCCACCATCACCATCACCAC
>SEQ ID NO: 251; DR462(DR239-DR234)
CAAGTGCAGCTGCAAGAGAGCGGAGGAGGAAGCGTGCAAGCCGGAGGCTCTCT
GAGGCTGAGCTGTACAGTGTCCGGCTACACTTACAGCTCCAATTGCATGGGCTGG
TTTAGGCAAGCCCCCGGCAAGGAAAGAGAGGGCGTGGCCACTATCTACACTGGC
GGCGGCAACACATACTACGCCGATAGCGTGAAGGGAAGGTTCACTATCAGCCAA
GATAACGCCAAGAACACAGTGTATCTGCAGATGAACAATCTGAAGCCAGAGGAC
ACTGCCATGTACTACTGTGCTGCTGAGCCACTGTCTAGGGTGTACGGCGGCAGCT
GCCCAACTCCTACATTCGACTACTGGGGCCAAGGCACACAAGTGACTGTCTCGA
GCGGCGGAGGATCCCAAGTGCAGCTGCAAGAGAGCGGAGGAGGAAGCGTGCAA
GCCGGAGGCTCTCTGAGGCTGAGCTGTGTGGCTAGTGGCTACACTTTCAGCAGCT
ACTGCATGGGCTGGTTCAGACAAGCCCCCGGCAAGGAAAGGGAAGGAGTGGCC
GCTCTGGGCGGAGGAAGCACATACTACGCTGACAGCGTGAAGGGAAGGTTCACA
ATCAGCCAAGATAACGCCAAGAACACACTGTATCTGCAGATGAACTCTCTGAAG
CCAGAGGACACAGCCATGTACTACTGTGCCGCTGCTTGGGTCGCTTGTCTGGAGT
TCGGCGGCAGCTGGTACGATCTGGCTAGGTACAAGCACTGGGGCCAAGGCACAC
AAGTGACAGTCTCGTCTGCTAGCCACCATCACCATCACCAC
>SEQ ID NO: 252; DR463(DR240-DR229)
CAAGTGCAGCTGCAAGAGAGCGGAGGAGGAAGCGTCCAAGCCGGAGGCTCTCT
GAGGCTGAGCTGTGGAGCCAGCGGCTACACTTACAGCAGCTACTGTATGGGCTG
GTTTAGGCAAGTGCCCGGCAAGGAGAGAGAGGGCGTGGCCGTGATCGATTCCGA
TGGCAGCACAAGCTACGCTGACAGCGTGAAGGGAAGGTTCACAATCAGCAAGGA
CAACGGCAAGAACACACTCTATCTGCAGATGAACAGCCTCAAGCCAGAGGACAC
AGCCATGTACTACTGCGCCGCTGATCTGGGCCACTATAGGCCTCCTTGTGGCGTG
CTGTATCTGGGCATGGATTACTGGGGCAAGGGCACACAAGTGACAGTCTCGAGC
GGCGGAGGATCCCAAGTGCAGCTGCAAGAGAGCGGAGGAGGACTGGTCCAGCC
CGGCGGCTCTCTGAGGCTGAGCTGCACTGCTTCCGGCTTCAGCTTCAGCAGCTAC
CCTATGACATGGGCTAGGCAAGCCCCCGGCAAAGGACTGGAATGGGTGAGCACT
ATTGCCAGCGATGGAGGCAGCACAGCCTACGCTGCCAGCGTGGAGGGAAGGTTC
ACAATCTCTAGGGACAATGCCAAGAGCACACTGTATCTGCAGCTGAACTCTCTGA
AGACAGAGGACACTGCCATGTACTACTGCACTAAGGGCTACGGCGATGGCACAC
CAGCTCCCGGCCAAGGCACACAAGTGACTGTCTCGTCTGCTAGCCACCATCACCA
TCACCAC
>SEQ ID NO: 253; DR464(DR240-DR230)
CAAGTGCAGCTGCAAGAGAGCGGAGGAGGAAGCGTCCAAGCCGGAGGCTCTCT
GAGGCTGAGCTGTGGAGCCAGCGGCTACACTTACAGCAGCTACTGTATGGGCTG
GTTTAGGCAAGTGCCCGGCAAGGAGAGAGAGGGCGTGGCCGTGATCGATTCCGA
TGGCAGCACAAGCTACGCTGACAGCGTGAAGGGAAGGTTCACAATCAGCAAGGA
CAACGGCAAGAACACACTCTATCTGCAGATGAACAGCCTCAAGCCAGAGGACAC
AGCCATGTACTACTGCGCCGCTGATCTGGGCCACTATAGGCCTCCTTGTGGCGTG
CTGTATCTGGGCATGGATTACTGGGGCAAGGGCACACAAGTGACAGTCTCGAGC
GGCGGAGGATCCCAAGTGCAGCTGCAAGAGAGCGGAGGAGGACTGGTGCAGCC
CGGCGGCTCTCTGAGGCTGAGCTGTGCTGCCAGCGGCTTCACTTTCAGCAGCGCT
CACATGAGCTGGGTGAGGCAAGCCCCCGGCAAAGGAAGGGAGTGGATCGCCTCC
ATCTACAGCGGCGGCGGAACATTCTACGCCGACAGCGTGAAGGGAAGGTTCACA
ATCTCTAGGGACAACGCCAAGAACACACTGTATCTGCAGCTGAACTCTCTGAAG
GCCGAGGACACTGCCATGTACTACTGCGCCACTAATAGGCTGCACTACTACAGC
GACGATGATTCTCTGAGGGGCCAAGGCACACAAGTGACAGTCTCGTCTGCTAGC
CACCATCACCATCACCAC
>SEQ ID NO: 254; DR465(DR240-DR231)
CAAGTGCAGCTGCAAGAGAGCGGAGGAGGAAGCGTCCAAGCCGGAGGCTCTCT
GAGGCTGAGCTGTGGAGCCAGCGGCTACACTTACAGCAGCTACTGTATGGGCTG
GTTTAGGCAAGTGCCCGGCAAGGAGAGAGAGGGCGTGGCCGTGATCGATTCCGA
TGGCAGCACAAGCTACGCTGACAGCGTGAAGGGAAGGTTCACAATCAGCAAGGA
CAACGGCAAGAACACACTCTATCTGCAGATGAACAGCCTCAAGCCAGAGGACAC
AGCCATGTACTACTGCGCCGCTGATCTGGGCCACTATAGGCCTCCTTGTGGCGTG
CTGTATCTGGGCATGGATTACTGGGGCAAGGGCACACAAGTGACAGTCTCGAGC
GGCGGAGGATCCCAAGTGCAGCTGCAAGAGAGCGGAGGAGGAAGCGTGCAAGC
CGGCGGATCTCTGAGACTCAGCTGTACTGCCTCCGGCTTCACATTCGACGATAGG
GAGATGAACTGGTATAGGCAAGCCCCCGGCAATGAGTGCGAGCTGGTGAGCACA
ATCTCCAGCGATGGCAGCACTTACTACGCCGATAGCGTGAAGGGAAGGTTCACT
ATCTCCCAAGATAACGCCAAGAACACAGTCTATCTGCAGATGGACTCCGTCAAG
CCAGAGGATACTGCCGTGTACTACTGCGCCGCCGACTTCATGATCGCCATCCAAG
CCCCCGGCGCTGGCTGTTGGGGACAAGGCACTCAAGTGACAGTCTCGTCTGCTAG
CCACCATCACCATCACCAC
>SEQ ID NO: 255; DR466(DR240-DR232)
CAAGTGCAGCTGCAAGAGAGCGGAGGAGGAAGCGTCCAAGCCGGAGGCTCTCT
GAGGCTGAGCTGTGGAGCCAGCGGCTACACTTACAGCAGCTACTGTATGGGCTG
GTTTAGGCAAGTGCCCGGCAAGGAGAGAGAGGGCGTGGCCGTGATCGATTCCGA
TGGCAGCACAAGCTACGCTGACAGCGTGAAGGGAAGGTTCACAATCAGCAAGGA
CAACGGCAAGAACACACTCTATCTGCAGATGAACAGCCTCAAGCCAGAGGACAC
AGCCATGTACTACTGCGCCGCTGATCTGGGCCACTATAGGCCTCCTTGTGGCGTG
CTGTATCTGGGCATGGATTACTGGGGCAAGGGCACACAAGTGACAGTCTCGAGC
GGCGGAGGATCCCAAGTGCAGCTGCAAGAGAGCGGAGGAGGCAGCGTGCAAGC
CGGAGGCTCTCTGAGACTGAGCTGTGTGGCTAGTGGCTACACAAGCTGCATGGG
CTGGTTTAGGCAAGCCCCCGGCAAGGAGAGAGAGGCCGTGGCCACAATCTACAC
TAGGGGAAGGAGCATCTACTACGCCGACAGCGTGAAAGGAAGGTTCACAATCAG
CCAAGATAACGCCAAGAACACTCTGTATCTGCAGATGAACAGCCTCAAGCCAGA
GGACATCGCCATGTATAGCTGTGCTGCTGGCGGCTATAGCTGGAGCGCTGGCTGC
GAGTTCAATTACTGGGGCCAAGGCACACAAGTGACTGTCTCGTCTGCTAGCCACC
ATCACCATCACCAC
>SEQ ID NO: 256; DR467(DR240-DR233)
CAAGTGCAGCTGCAAGAGAGCGGAGGAGGAAGCGTCCAAGCCGGAGGCTCTCT
GAGGCTGAGCTGTGGAGCCAGCGGCTACACTTACAGCAGCTACTGTATGGGCTG
GTTTAGGCAAGTGCCCGGCAAGGAGAGAGAGGGCGTGGCCGTGATCGATTCCGA
TGGCAGCACAAGCTACGCTGACAGCGTGAAGGGAAGGTTCACAATCAGCAAGGA
CAACGGCAAGAACACACTCTATCTGCAGATGAACAGCCTCAAGCCAGAGGACAC
AGCCATGTACTACTGCGCCGCTGATCTGGGCCACTATAGGCCTCCTTGTGGCGTG
CTGTATCTGGGCATGGATTACTGGGGCAAGGGCACACAAGTGACAGTCTCGAGC
GGCGGAGGATCCCAAGTGCAGCTGCAAGAGAGCGGAGGCGGAAGCGTGCAAGC
TGGAGGATCTCTGAGGCTGAGCTGCACAGCCAGCGGCTTCACTTTCGATGACAGC
GACATGGGCTGGTATAGGCAAGCCCCCGGCAATGAGTGTGAGCTGGTGAGCACA
ATCAGCAGCGACGGCTCCACTTACTACGCCGACAGCGTCAAGGGAAGGTTCACA
ATCAGCCAAGATAACGCCAAGAACACTGTGTATCTGCAGATGAACTCTCTGAAG
CCAGAGGACACAGCCGTGTACTACTGTGCTGCCGAGCCTAGGGGCTACTATAGC
AACTACGGCGGAAGGAGGGAGTGCAATTACTGGGGCCAAGGCACACAAGTGAC
AGTCTCGTCTGCTAGCCACCATCACCATCACCAC
>SEQ ID NO: 257; DR468(DR240-DR234)
CAAGTGCAGCTGCAAGAGAGCGGAGGAGGAAGCGTCCAAGCCGGAGGCTCTCT
GAGGCTGAGCTGTGGAGCCAGCGGCTACACTTACAGCAGCTACTGTATGGGCTG
GTTTAGGCAAGTGCCCGGCAAGGAGAGAGAGGGCGTGGCCGTGATCGATTCCGA
TGGCAGCACAAGCTACGCTGACAGCGTGAAGGGAAGGTTCACAATCAGCAAGGA
CAACGGCAAGAACACACTCTATCTGCAGATGAACAGCCTCAAGCCAGAGGACAC
AGCCATGTACTACTGCGCCGCTGATCTGGGCCACTATAGGCCTCCTTGTGGCGTG
CTGTATCTGGGCATGGATTACTGGGGCAAGGGCACACAAGTGACAGTCTCGAGC
GGCGGAGGATCCCAAGTGCAGCTGCAAGAGAGCGGAGGAGGAAGCGTGCAAGC
CGGAGGCTCTCTGAGGCTGAGCTGTGTGGCTAGTGGCTACACTTTCAGCAGCTAC
TGCATGGGCTGGTTCAGACAAGCCCCCGGCAAGGAAAGGGAAGGAGTGGCCGCT
CTGGGCGGAGGAAGCACATACTACGCTGACAGCGTGAAGGGAAGGTTCACAATC
AGCCAAGATAACGCCAAGAACACACTGTATCTGCAGATGAACTCTCTGAAGCCA
GAGGACACAGCCATGTACTACTGTGCCGCTGCTTGGGTCGCTTGTCTGGAGTTCG
GCGGCAGCTGGTACGATCTGGCTAGGTACAAGCACTGGGGCCAAGGCACACAAG
TGACAGTCTCGTCTGCTAGCCACCATCACCATCACCAC
>SEQ ID NO: 258; DR469(DR241-DR229)
CAAGTGCAGCTGCAAGAGAGCGGAGGAGGAAGCGTCCAAGCCGGAGGCTCTCT
GAGACTGAGCTGTGCCGCCAGCGGCTACTCCAACTGCAGCTACGACATGACTTG
GTATAGGCAAGCCCCCGGCAAGGAGAGGGAGTTCGTGTCCGCCATCCACAGCGA
CGGCAGCACTAGATACGCCGACAGCGTGAAGGGAAGGTTCTTCATCAGCCAAGA
TAACGCCAAGAACACAGTGTATCTGCAGATGAACTCCCTCAAGCCAGAGGACAC
TGCCATGTACTACTGCAAGACAGACCCACTGCACTGCAGAGCCCATGGCGGCAG
CTGGTATAGCGTGAGGGCCAACTACTGGGGCCAAGGCACACAAGTGACAGTCTC
GAGCGGCGGAGGATCCCAAGTGCAGCTGCAAGAGAGCGGAGGAGGACTGGTCC
AGCCCGGCGGCTCTCTGAGGCTGAGCTGCACTGCTTCCGGCTTCAGCTTCAGCAG
CTACCCTATGACATGGGCTAGGCAAGCCCCCGGCAAAGGACTGGAATGGGTGAG
CACTATTGCCAGCGATGGAGGCAGCACAGCCTACGCTGCCAGCGTGGAGGGAAG
GTTCACAATCTCTAGGGACAATGCCAAGAGCACACTGTATCTGCAGCTGAACTCT
CTGAAGACAGAGGACACTGCCATGTACTACTGCACTAAGGGCTACGGCGATGGC
ACACCAGCTCCCGGCCAAGGCACACAAGTGACTGTCTCGTCTGCTAGCCACCATC
ACCATCACCAC
>SEQ ID NO: 259; DR470(DR241-DR230)
CAAGTGCAGCTGCAAGAGAGCGGAGGAGGAAGCGTCCAAGCCGGAGGCTCTCT
GAGACTGAGCTGTGCCGCCAGCGGCTACTCCAACTGCAGCTACGACATGACTTG
GTATAGGCAAGCCCCCGGCAAGGAGAGGGAGTTCGTGTCCGCCATCCACAGCGA
CGGCAGCACTAGATACGCCGACAGCGTGAAGGGAAGGTTCTTCATCAGCCAAGA
TAACGCCAAGAACACAGTGTATCTGCAGATGAACTCCCTCAAGCCAGAGGACAC
TGCCATGTACTACTGCAAGACAGACCCACTGCACTGCAGAGCCCATGGCGGCAG
CTGGTATAGCGTGAGGGCCAACTACTGGGGCCAAGGCACACAAGTGACAGTCTC
GAGCGGCGGAGGATCCCAAGTGCAGCTGCAAGAGAGCGGAGGAGGACTGGTGC
AGCCCGGCGGCTCTCTGAGGCTGAGCTGTGCTGCCAGCGGCTTCACTTTCAGCAG
CGCTCACATGAGCTGGGTGAGGCAAGCCCCCGGCAAAGGAAGGGAGTGGATCGC
CTCCATCTACAGCGGCGGCGGAACATTCTACGCCGACAGCGTGAAGGGAAGGTT
CACAATCTCTAGGGACAACGCCAAGAACACACTGTATCTGCAGCTGAACTCTCTG
AAGGCCGAGGACACTGCCATGTACTACTGCGCCACTAATAGGCTGCACTACTAC
AGCGACGATGATTCTCTGAGGGGCCAAGGCACACAAGTGACAGTCTCGTCTGCT
AGCCACCATCACCATCACCAC
>SEQ ID NO: 260; DR471(DR241-DR231)
CAAGTGCAGCTGCAAGAGAGCGGAGGAGGAAGCGTCCAAGCCGGAGGCTCTCT
GAGACTGAGCTGTGCCGCCAGCGGCTACTCCAACTGCAGCTACGACATGACTTG
GTATAGGCAAGCCCCCGGCAAGGAGAGGGAGTTCGTGTCCGCCATCCACAGCGA
CGGCAGCACTAGATACGCCGACAGCGTGAAGGGAAGGTTCTTCATCAGCCAAGA
TAACGCCAAGAACACAGTGTATCTGCAGATGAACTCCCTCAAGCCAGAGGACAC
TGCCATGTACTACTGCAAGACAGACCCACTGCACTGCAGAGCCCATGGCGGCAG
CTGGTATAGCGTGAGGGCCAACTACTGGGGCCAAGGCACACAAGTGACAGTCTC
GAGCGGCGGAGGATCCCAAGTGCAGCTGCAAGAGAGCGGAGGAGGAAGCGTGC
AAGCCGGCGGATCTCTGAGACTCAGCTGTACTGCCTCCGGCTTCACATTCGACGA
TAGGGAGATGAACTGGTATAGGCAAGCCCCCGGCAATGAGTGCGAGCTGGTGAG
CACAATCTCCAGCGATGGCAGCACTTACTACGCCGATAGCGTGAAGGGAAGGTT
CACTATCTCCCAAGATAACGCCAAGAACACAGTCTATCTGCAGATGGACTCCGTC
AAGCCAGAGGATACTGCCGTGTACTACTGCGCCGCCGACTTCATGATCGCCATCC
AAGCCCCCGGCGCTGGCTGTTGGGGACAAGGCACTCAAGTGACAGTCTCGTCTG
CTAGCCACCATCACCATCACCAC
>SEQ ID NO: 261; DR472(DR241-DR232)
CAAGTGCAGCTGCAAGAGAGCGGAGGAGGAAGCGTCCAAGCCGGAGGCTCTCT
GAGACTGAGCTGTGCCGCCAGCGGCTACTCCAACTGCAGCTACGACATGACTTG
GTATAGGCAAGCCCCCGGCAAGGAGAGGGAGTTCGTGTCCGCCATCCACAGCGA
CGGCAGCACTAGATACGCCGACAGCGTGAAGGGAAGGTTCTTCATCAGCCAAGA
TAACGCCAAGAACACAGTGTATCTGCAGATGAACTCCCTCAAGCCAGAGGACAC
TGCCATGTACTACTGCAAGACAGACCCACTGCACTGCAGAGCCCATGGCGGCAG
CTGGTATAGCGTGAGGGCCAACTACTGGGGCCAAGGCACACAAGTGACAGTCTC
GAGCGGCGGAGGATCCCAAGTGCAGCTGCAAGAGAGCGGAGGAGGCAGCGTGC
AAGCCGGAGGCTCTCTGAGACTGAGCTGTGTGGCTAGTGGCTACACAAGCTGCA
TGGGCTGGTTTAGGCAAGCCCCCGGCAAGGAGAGAGAGGCCGTGGCCACAATCT
ACACTAGGGGAAGGAGCATCTACTACGCCGACAGCGTGAAAGGAAGGTTCACAA
TCAGCCAAGATAACGCCAAGAACACTCTGTATCTGCAGATGAACAGCCTCAAGC
CAGAGGACATCGCCATGTATAGCTGTGCTGCTGGCGGCTATAGCTGGAGCGCTG
GCTGCGAGTTCAATTACTGGGGCCAAGGCACACAAGTGACTGTCTCGTCTGCTAG
CCACCATCACCATCACCAC
>SEQ ID NO: 262; DR473(DR241-DR233)
CAAGTGCAGCTGCAAGAGAGCGGAGGAGGAAGCGTCCAAGCCGGAGGCTCTCT
GAGACTGAGCTGTGCCGCCAGCGGCTACTCCAACTGCAGCTACGACATGACTTG
GTATAGGCAAGCCCCCGGCAAGGAGAGGGAGTTCGTGTCCGCCATCCACAGCGA
CGGCAGCACTAGATACGCCGACAGCGTGAAGGGAAGGTTCTTCATCAGCCAAGA
TAACGCCAAGAACACAGTGTATCTGCAGATGAACTCCCTCAAGCCAGAGGACAC
TGCCATGTACTACTGCAAGACAGACCCACTGCACTGCAGAGCCCATGGCGGCAG
CTGGTATAGCGTGAGGGCCAACTACTGGGGCCAAGGCACACAAGTGACAGTCTC
GAGCGGCGGAGGATCCCAAGTGCAGCTGCAAGAGAGCGGAGGCGGAAGCGTGC
AAGCTGGAGGATCTCTGAGGCTGAGCTGCACAGCCAGCGGCTTCACTTTCGATG
ACAGCGACATGGGCTGGTATAGGCAAGCCCCCGGCAATGAGTGTGAGCTGGTGA
GCACAATCAGCAGCGACGGCTCCACTTACTACGCCGACAGCGTCAAGGGAAGGT
TCACAATCAGCCAAGATAACGCCAAGAACACTGTGTATCTGCAGATGAACTCTCT
GAAGCCAGAGGACACAGCCGTGTACTACTGTGCTGCCGAGCCTAGGGGCTACTA
TAGCAACTACGGCGGAAGGAGGGAGTGCAATTACTGGGGCCAAGGCACACAAG
TGACAGTCTCGTCTGCTAGCCACCATCACCATCACCAC
>SEQ ID NO: 263; DR474(DR241-DR234)
CAAGTGCAGCTGCAAGAGAGCGGAGGAGGAAGCGTCCAAGCCGGAGGCTCTCT
GAGACTGAGCTGTGCCGCCAGCGGCTACTCCAACTGCAGCTACGACATGACTTG
GTATAGGCAAGCCCCCGGCAAGGAGAGGGAGTTCGTGTCCGCCATCCACAGCGA
CGGCAGCACTAGATACGCCGACAGCGTGAAGGGAAGGTTCTTCATCAGCCAAGA
TAACGCCAAGAACACAGTGTATCTGCAGATGAACTCCCTCAAGCCAGAGGACAC
TGCCATGTACTACTGCAAGACAGACCCACTGCACTGCAGAGCCCATGGCGGCAG
CTGGTATAGCGTGAGGGCCAACTACTGGGGCCAAGGCACACAAGTGACAGTCTC
GAGCGGCGGAGGATCCCAAGTGCAGCTGCAAGAGAGCGGAGGAGGAAGCGTGC
AAGCCGGAGGCTCTCTGAGGCTGAGCTGTGTGGCTAGTGGCTACACTTTCAGCAG
CTACTGCATGGGCTGGTTCAGACAAGCCCCCGGCAAGGAAAGGGAAGGAGTGGC
CGCTCTGGGCGGAGGAAGCACATACTACGCTGACAGCGTGAAGGGAAGGTTCAC
AATCAGCCAAGATAACGCCAAGAACACACTGTATCTGCAGATGAACTCTCTGAA
GCCAGAGGACACAGCCATGTACTACTGTGCCGCTGCTTGGGTCGCTTGTCTGGAG
TTCGGCGGCAGCTGGTACGATCTGGCTAGGTACAAGCACTGGGGCCAAGGCACA
CAAGTGACAGTCTCGTCTGCTAGCCACCATCACCATCACCAC

[0481] It is understood that the embodiments described herein are for illustrative purposes only and that various modifications or changes in light thereof will be suggested to persons skilled in the art and are to be included within the spirit and purview of this application and scope of the appended claims. The sequences of the sequence accession numbers cited herein are hereby incorporated by reference.

The application's sequence listing, which the Patent Office published only in electronic form, follows.

SEQUENCE LISTING (578 sequences)

SEQ ID NO: 1 - protein, 5 aa, Artificial Sequence
  Description of Artificial Sequence: Synthetic peptide
IDYMA

SEQ ID NO: 2 - protein, 17 aa, Artificial Sequence
  Description of Artificial Sequence: Synthetic peptide
VIYTASGATFYPDSVKG

SEQ ID NO: 3 - protein, 16 aa, Artificial Sequence
  Description of Artificial Sequence: Synthetic peptide
VRKTDSYLFDAQSFTY

SEQ ID NO: 4 - protein, 125 aa, Artificial Sequence
  Description of Artificial Sequence: Synthetic polypeptide
QVQLQESGGGSVQAGGSLRLSCAASRYLYSIDYMAWFRQSPGKEREPVAVIYTASGATFYPDSVKGRFTISQDNAKMTVYLQMNSLKSEDTAMYYCAAVRKTDSYLFDAQSFTYWGQGTQVTVSS

SEQ ID NO: 5 - protein, 5 aa, Artificial Sequence
  Description of Artificial Sequence: Synthetic peptide
SYCMG

SEQ ID NO: 6 - protein, 16 aa, Artificial Sequence
  Description of Artificial Sequence: Synthetic peptide
SIDSDGSTSYTDSVKG

SEQ ID NO: 7 - protein, 21 aa, Artificial Sequence
  Description of Artificial Sequence: Synthetic peptide
DLMSTVVPGFCGFLLSAGMDY

SEQ ID NO: 8 - protein, 129 aa, Artificial Sequence
  Description of Artificial Sequence: Synthetic polypeptide
QVQLQESGGGSVQAGGSLRLSCAASRFTYSSYCMGWFRQAPGKEREGVASIDSDGSTSYTDSVKGRFTISKDNAKNTLYLQMNSLKPEDTAMYYCALDLMSTVVPGFCGFLLSAGMDYWGKGTQVTVSS

SEQ ID NO: 9 - protein, 5 aa, Artificial Sequence
  Description of Artificial Sequence: Synthetic peptide
MYCMG

SEQ ID NO: 10 - protein, 16 aa, Artificial Sequence
  Description of Artificial Sequence: Synthetic peptide
QINSDGSTSYADSVKG

SEQ ID NO: 11 - protein, 23 aa, Artificial Sequence
  Description of Artificial Sequence: Synthetic peptide
DSRVYGGSWYERLCGPYTYEYNY

SEQ ID NO: 12 - protein, 131 aa, Artificial Sequence
  Description of Artificial Sequence: Synthetic polypeptide
QVQLQESGGGSVQAGGSLRLSCAASGYTYSMYCMGWFRQAPGKEREGVAQINSDGSTSYADSVKGRFTISKDNAKNTLYLQMNSLKPEDTAMYYCAADSRVYGGSWYERLCGPYTYEYNYWGQGTQVTVSS

SEQ ID NO: 13 - protein, 5 aa, Artificial Sequence
  Description of Artificial Sequence: Synthetic peptide
SNCMG

SEQ ID NO: 14 - protein, 17 aa, Artificial Sequence
  Description of Artificial Sequence: Synthetic peptide
TIYTGGGNTYYADSVKG

SEQ ID NO: 15 - protein, 18 aa, Artificial Sequence
  Description of Artificial Sequence: Synthetic peptide
EPLSRVYGGSCPTPTFDY

SEQ ID NO: 16 - protein, 127 aa, Artificial Sequence
  Description of Artificial Sequence: Synthetic polypeptide
QVQLQESGGGSVQAGGSLRLSCTVSGYTYSSNCMGWFRQAPGKEREGVATIYTGGGNTYYADSVKGRFTISQDNAKNTVYLQMNNLKPEDTAMYYCAAEPLSRVYGGSCPTPTFDYWGQGTQVTVSS

SEQ ID NO: 17 - protein, 5 aa, Artificial Sequence
  Description of Artificial Sequence: Synthetic peptide
SYCMG

SEQ ID NO: 18 - protein, 16 aa, Artificial Sequence
  Description of Artificial Sequence: Synthetic peptide
VIDSDGSTSYADSVKG

SEQ ID NO: 19 - protein, 18 aa, Artificial Sequence
  Description of Artificial Sequence: Synthetic peptide
DLGHYRPPCGVLYLGMDY

SEQ ID NO: 20 - protein, 126 aa, Artificial Sequence
  Description of Artificial Sequence: Synthetic polypeptide
QVQLQESGGGSVQAGGSLRLSCGASGYTYSSYCMGWFRQVPGKEREGVAVIDSDGSTSYADSVKGRFTISKDNGKNTLYLQMNSLKPEDTAMYYCAADLGHYRPPCGVLYLGMDYWGKGTQVTVSS

SEQ ID NO: 21 - protein, 5 aa, Artificial Sequence
  Description of Artificial Sequence: Synthetic peptide
SYDMT

SEQ ID NO: 22 - protein, 16 aa, Artificial Sequence
  Description of Artificial Sequence: Synthetic peptide
AIHSDGSTRYADSVKG

SEQ ID NO: 23 - protein, 19 aa, Artificial Sequence
  Description of Artificial Sequence: Synthetic peptide
DPLHCRAHGGSWYSVRANY

SEQ ID NO: 24 - protein, 127 aa, Artificial Sequence
  Description of Artificial Sequence: Synthetic polypeptide
QVQLQESGGGSVQAGGSLRLSCAASGYSNCSYDMTWYRQAPGKEREFVSAIHSDGSTRYADSVKGRFFISQDNAKNTVYLQMNSLKPEDTAMYYCKTDPLHCRAHGGSWYSVRANYWGQGTQVTVSS

SEQ ID NO: 25 - protein, 5 aa, Artificial Sequence
  Description of Artificial Sequence: Synthetic peptide
SYPMT

SEQ ID NO: 26 - protein, 17 aa, Artificial Sequence
  Description of Artificial Sequence: Synthetic peptide
TIASDGGSTAYAASVEG

SEQ ID NO: 27 - protein, 8 aa, Artificial Sequence
  Description of Artificial Sequence: Synthetic peptide
GYGDGTPA

SEQ ID NO: 28 - protein, 117 aa, Artificial Sequence
  Description of Artificial Sequence: Synthetic polypeptide
QVQLQESGGGLVQPGGSLRLSCTASGFSFSSYPMTWARQAPGKGLEWVSTIASDGGSTAYAASVEGRFTISRDNAKSTLYLQLNSLKTEDTAMYYCTKGYGDGTPAPGQGTQVTVSS

SEQ ID NO: 29 - protein, 5 aa, Artificial Sequence
  Description of Artificial Sequence: Synthetic peptide
SAHMS

SEQ ID NO: 30 - protein, 16 aa, Artificial Sequence
  Description of Artificial Sequence: Synthetic peptide
SIYSGGGTFYADSVKG

SEQ ID NO: 31 - protein, 12 aa, Artificial Sequence
  Description of Artificial Sequence: Synthetic peptide
NRLHYYSDDDSL

SEQ ID NO: 32 - protein, 120 aa, Artificial Sequence
  Description of Artificial Sequence: Synthetic polypeptide
QVQLQESGGGLVQPGGSLRLSCAASGFTFSSAHMSWVRQAPGKGREWIASIYSGGGTFYADSVKGRFTISRDNAKNTLYLQLNSLKAEDTAMYYCATNRLHYYSDDDSLRGQGTQVTVSS

SEQ ID NO: 33 - protein, 5 aa, Artificial Sequence
  Description of Artificial Sequence: Synthetic peptide
DREMN

SEQ ID NO: 34 - protein, 16 aa, Artificial Sequence
  Description of Artificial Sequence: Synthetic peptide
TISSDGSTYYADSVKG

SEQ ID NO: 35 - protein, 13 aa, Artificial Sequence
  Description of Artificial Sequence: Synthetic peptide
DFMIAIQAPGAGC

SEQ ID NO: 36 - protein, 121 aa, Artificial Sequence
  Description of Artificial Sequence: Synthetic polypeptide
QVQLQESGGGSVQAGGSLRLSCTASGFTFDDREMNWYRQAPGNECELVSTISSDGSTYYADSVKGRFTISQDNAKNTVYLQMDSVKPEDTAVYYCAADFMIAIQAPGAGCWGQGTQVTVSS

SEQ ID NO: 37 - protein, 3 aa, Artificial Sequence
  Description of Artificial Sequence: Synthetic peptide
CMG

SEQ ID NO: 38 - protein, 17 aa, Artificial Sequence
  Description of Artificial Sequence: Synthetic peptide
TIYTRGRSIYYADSVKG

SEQ ID NO: 39 - protein, 13 aa, Artificial Sequence
  Description of Artificial Sequence: Synthetic peptide
GGYSWSAGCEFNY

SEQ ID NO: 40 - protein, 119 aa, Artificial Sequence
  Description of Artificial Sequence: Synthetic polypeptide
QVQLQESGGGSVQAGGSLRLSCVASGYTSCMGWFRQAPGKEREAVATIYTRGRSIYYADSVKGRFTISQDNAKNTLYLQMNSLKPEDIAMYSCAAGGYSWSAGCEFNYWGQGTQVTVSS

SEQ ID NO: 41 - protein, 5 aa, Artificial Sequence
  Description of Artificial Sequence: Synthetic peptide
DSDMG

SEQ ID NO: 42 - protein, 16 aa, Artificial Sequence
  Description of Artificial Sequence: Synthetic peptide
TISSDGSTYYADSVKG

SEQ ID NO: 43 - protein, 17 aa, Artificial Sequence
  Description of Artificial Sequence: Synthetic peptide
EPRGYYSNYGGRRECNY

SEQ ID NO: 44 - protein, 125 aa, Artificial Sequence
  Description of Artificial Sequence: Synthetic polypeptide
QVQLQESGGGSVQAGGSLRLSCTASGFTFDDSDMGWYRQAPGNECELVSTISSDGSTYYADSVKGRFTISQDNAKNTVYLQMNSLKPEDTAVYYCAAEPRGYYSNYGGRRECNYWGQGTQVTVSS

SEQ ID NO: 45 - protein, 5 aa, Artificial Sequence
  Description of Artificial Sequence: Synthetic peptide
SYCMG

SEQ ID NO: 46 - protein, 15 aa, Artificial Sequence
  Description of Artificial Sequence: Synthetic peptide
ALGGGSTYYADSVKG

SEQ ID NO: 47 - protein, 20 aa, Artificial Sequence
  Description of Artificial Sequence: Synthetic peptide
AWVACLEFGGSWYDLARYKH

SEQ ID NO: 48 - protein, 127 aa, Artificial Sequence
  Description of Artificial Sequence: Synthetic polypeptide
QVQLQESGGGSVQAGGSLRLSCVASGYTFSSYCMGWFRQAPGKEREGVAALGGGSTYYADSVKGRFTISQDNAKNTLYLQMNSLKPEDTAMYYCAAAWVACLEFGGSWYDLARYKHWGQGTQVTVSS

SEQ ID NO: 49 - protein, 262 aa, Artificial Sequence
  Description of Artificial Sequence: Synthetic polypeptide
QVQLQESGGGSVQAGGSLRLSCAASRYLYSIDYMAWFRQSPGKEREPVAVIYTASGATFYPDSVKGRFTISQDNAKMTVYLQMNSLKSEDTAMYYCAAVRKTDSYLFDAQSFTYWGQGTQVTVSSGGGSQVQLQESGGGSVQAGGSLRLSCTASGFTFDDSDMGWYRQAPGNECELVSTISSDGSTYYADSVKGRFTISQDNAKNTVYLQMNSLKPEDTAVYYCAAEPRGYYSNYGGRRECNYWGQGTQVTVSSASHHHHHH

SEQ ID NO: 50 - protein, 264 aa, Artificial Sequence
  Description of Artificial Sequence: Synthetic polypeptide
QVQLQESGGGSVQAGGSLRLSCAASRYLYSIDYMAWFRQSPGKEREPVAVIYTASGATFYPDSVKGRFTISQDNAKMTVYLQMNSLKSEDTAMYYCAAVRKTDSYLFDAQSFTYWGQGTQVTVSSGGGSQVQLQESGGGSVQAGGSLRLSCVASGYTFSSYCMGWFRQAPGKEREGVAALGGGSTYYADSVKGRFTISQDNAKNTLYLQMNSLKPEDTAMYYCAAAWVACLEFGGSWYDLARYKHWGQGTQVTVSSASHHHHHH

SEQ ID NO: 51 - protein, 262 aa, Artificial Sequence
  Description of Artificial Sequence: Synthetic polypeptide
QVQLQESGGGSVQAGGSLRLSCAASRFTYSSYCMGWFRQAPGKEREGVASIDSDGSTSYTDSVKGRFTISKDNAKNTLYLQMNSLKPEDTAMYYCALDLMSTVVPGFCGFLLSAGMDYWGKGTQVTVSSGGGSQVQLQESGGGSVQAGGSLRLSCTASGFTFDDREMNWYRQAPGNECELVSTISSDGSTYYADSVKGRFTISQDNAKNTVYLQMDSVKPEDTAVYYCAADFMIAIQAPGAGCWGQGTQVTVSSASHHHHHH

SEQ ID NO: 52 - protein, 260 aa, Artificial Sequence
  Description of Artificial Sequence: Synthetic polypeptide
QVQLQESGGGSVQAGGSLRLSCAASRFTYSSYCMGWFRQAPGKEREGVASIDSDGSTSYTDSVKGRFTISKDNAKNTLYLQMNSLKPEDTAMYYCALDLMSTVVPGFCGFLLSAGMDYWGKGTQVTVSSGGGSQVQLQESGGGSVQAGGSLRLSCVASGYTSCMGWFRQAPGKEREAVATIYTRGRSIYYADSVKGRFTISQDNAKNTLYLQMNSLKPEDIAMYSCAAGGYSWSAGCEFNYWGQGTQVTVSSASHHHHHH

SEQ ID NO: 53 - protein, 268 aa, Artificial Sequence
  Description of Artificial Sequence: Synthetic polypeptide
QVQLQESGGGSVQAGGSLRLSCAASRFTYSSYCMGWFRQAPGKEREGVASIDSDGSTSYTDSVKGRFTISKDNAKNTLYLQMNSLKPEDTAMYYCALDLMSTVVPGFCGFLLSAGMDYWGKGTQVTVSSGGGSQVQLQESGGGSVQAGGSLRLSCVASGYTFSSYCMGWFRQAPGKEREGVAALGGGSTYYADSVKGRFTISQDNAKNTLYLQMNSLKPEDTAMYYCAAAWVACLEFGGSWYDLARYKHWGQGTQVTVSSASHHHHHH

SEQ ID NO: 54 - protein, 268 aa, Artificial Sequence
  Description of Artificial Sequence: Synthetic polypeptide
QVQLQESGGGSVQAGGSLRLSCAASGYTYSMYCMGWFRQAPGKEREGVAQINSDGSTSYADSVKGRFTISKDNAKNTLYLQMNSLKPEDTAMYYCAADSRVYGGSWYERLCGPYTYEYNYWGQGTQVTVSSGGGSQVQLQESGGGSVQAGGSLRLSCTASGFTFDDSDMGWYRQAPGNECELVSTISSDGSTYYADSVKGRFTISQDNAKNTVYLQMNSLKPEDTAVYYCAAEPRGYYSNYGGRRECNYWGQGTQVTVSSASHHHHHH

SEQ ID NO: 55 - protein, 259 aa, Artificial Sequence
  Description of Artificial Sequence: Synthetic polypeptide
QVQLQESGGGSVQAGGSLRLSCGASGYTYSSYCMGWFRQVPGKEREGVAVIDSDGSTSYADSVKGRFTISKDNGKNTLYLQMNSLKPEDTAMYYCAADLGHYRPPCGVLYLGMDYWGKGTQVTVSSGGGSQVQLQESGGGSVQAGGSLRLSCTASGFTFDDREMNWYRQAPGNECELVSTISSDGSTYYADSVKGRFTISQDNAKNTVYLQMDSVKPEDTAVYYCAADFMIAIQAPGAGCWGQGTQVTVSSASHHHHHH

SEQ ID NO: 56 - protein, 257 aa, Artificial Sequence
  Description of Artificial Sequence: Synthetic polypeptide
QVQLQESGGGSVQAGGSLRLSCGASGYTYSSYCMGWFRQVPGKEREGVAVIDSDGSTSYADSVKGRFTISKDNGKNTLYLQMNSLKPEDTAMYYCAADLGHYRPPCGVLYLGMDYWGKGTQVTVSSGGGSQVQLQESGGGSVQAGGSLRLSCVASGYTSCMGWFRQAPGKEREAVATIYTRGRSIYYADSVKGRFTISQDNAKNTLYLQMNSLKPEDIAMYSCAAGGYSWSAGCEFNYWGQGTQVTVSSASHHHHHH

SEQ ID NO: 57 - protein, 265 aa, Artificial Sequence
  Description of Artificial Sequence: Synthetic polypeptide
QVQLQESGGGSVQAGGSLRLSCGASGYTYSSYCMGWFRQVPGKEREGVAVIDSDGSTSYADSVKGRFTISKDNGKNTLYLQMNSLKPEDTAMYYCAADLGHYRPPCGVLYLGMDYWGKGTQVTVSSGGGSQVQLQESGGGSVQAGGSLRLSCVASGYTFSSYCMGWFRQAPGKEREGVAALGGGSTYYADSVKGRFTISQDNAKNTLYLQMNSLKPEDTAMYYCAAAWVACLEFGGSWYDLARYKHWGQGTQVTVSSASHHHHHH

SEQ ID NO: 58 - protein, 260 aa, Artificial Sequence
  Description of Artificial Sequence: Synthetic polypeptide
QVQLQESGGGSVQAGGSLRLSCAASGYSNCSYDMTWYRQAPGKEREFVSAIHSDGSTRYADSVKGRFFISQDNAKNTVYLQMNSLKPEDTAMYYCKTDPLHCRAHGGSWYSVRANYWGQGTQVTVSSGGGSQVQLQESGGGSVQAGGSLRLSCTASGFTFDDREMNWYRQAPGNECELVSTISSDGSTYYADSVKGRFTISQDNAKNTVYLQMDSVKPEDTAVYYCAADFMIAIQAPGAGCWGQGTQVTVSSASHHHHHH

SEQ ID NO: 59 - protein, 266 aa, Artificial Sequence
  Description of Artificial Sequence: Synthetic polypeptide
QVQLQESGGGSVQAGGSLRLSCAASGYSNCSYDMTWYRQAPGKEREFVSAIHSDGSTRYADSVKGRFFISQDNAKNTVYLQMNSLKPEDTAMYYCKTDPLHCRAHGGSWYSVRANYWGQGTQVTVSSGGGSQVQLQESGGGSVQAGGSLRLSCVASGYTFSSYCMGWFRQAPGKEREGVAALGGGSTYYADSVKGRFTISQDNAKNTLYLQMNSLKPEDTAMYYCAAAWVACLEFGGSWYDLARYKHWGQGTQVTVSSASHHHHHH

SEQ ID NO: 60 - protein, 258 aa, Artificial Sequence
  Description of Artificial Sequence: Synthetic polypeptide
QVQLQESGGGLVQPGGSLRLSCTASGFSFSSYPMTWARQAPGKGLEWVSTIASDGGSTAYAASVEGRFTISRDNAKSTLYLQLNSLKTEDTAMYYCTKGYGDGTPAPGQGTQVTVSSGGGSQVQLQESGGGSVQAGGSLRLSCAASRFTYSSYCMGWFRQAPGKEREGVASIDSDGSTSYTDSVKGRFTISKDNAKNTLYLQMNSLKPEDTAMYYCALDLMSTVVPGFCGFLLSAGMDYWGKGTQVTVSSASHHHHHH

SEQ ID NO: 61 - protein, 256 aa, Artificial Sequence
  Description of Artificial Sequence: Synthetic polypeptide
QVQLQESGGGLVQPGGSLRLSCTASGFSFSSYPMTWARQAPGKGLEWVSTIASDGGSTAYAASVEGRFTISRDNAKSTLYLQLNSLKTEDTAMYYCTKGYGDGTPAPGQGTQVTVSSGGGSQVQLQESGGGSVQAGGSLRLSCTVSGYTYSSNCMGWFRQAPGKEREGVATIYTGGGNTYYADSVKGRFTISQDNAKNTVYLQMNNLKPEDTAMYYCAAEPLSRVYGGSCPTPTFDYWGQGTQVTVSSASHHHHHH

SEQ ID NO: 62 - protein, 4 aa, Artificial Sequence
  Description of Artificial Sequence: Synthetic peptide
GGGS

SEQ ID NO: 63 - protein, 5 aa, Artificial Sequence
  Description of Artificial Sequence: Synthetic peptide
GGGGS

SEQ ID NO: 64 - protein, 6 aa, Artificial Sequence
  Description of Artificial Sequence: Synthetic peptide
GGGGGS

SEQ ID NO: 65 - protein, 4 aa, Artificial Sequence
  Description of Artificial Sequence: Synthetic peptide
GGSG

SEQ ID NO: 66 - protein, 4 aa, Artificial Sequence
  Description of Artificial Sequence: Synthetic peptide
SGGG

SEQ ID NO: 67 - protein, 4 aa, Artificial Sequence
  Description of Artificial Sequence: Synthetic peptide
GSGS

SEQ ID NO: 68 - protein, 6 aa, Artificial Sequence
  Description of Artificial Sequence: Synthetic peptide
GSGSGS

SEQ ID NO: 69 - protein, 8 aa, Artificial Sequence
  Description of Artificial Sequence: Synthetic peptide
GSGSGSGS

SEQ ID NO: 70 - protein, 10 aa, Artificial Sequence
  Description of Artificial Sequence: Synthetic peptide
GSGSGSGSGS

SEQ ID NO: 71 - protein, 12 aa, Artificial Sequence
  Description of Artificial Sequence: Synthetic peptide
GSGSGSGSGSGS

SEQ ID NO: 72 - protein, 6 aa, Artificial Sequence
  Description of Artificial Sequence: Synthetic peptide
GGSGGS

SEQ ID NO: 73 - protein, 9 aa, Artificial Sequence
  Description of Artificial Sequence: Synthetic peptide
GGSGGSGGS

SEQ ID NO: 74 - protein, 12 aa, Artificial Sequence
  Description of Artificial Sequence: Synthetic peptide
GGSGGSGGSGGS

SEQ ID NO: 75 - protein, 8 aa, Artificial Sequence
  Description of Artificial Sequence: Synthetic peptide
GGSGGGSG

SEQ ID NO: 76 - protein, 12 aa, Artificial Sequence
  Description of Artificial Sequence: Synthetic peptide
GGSGGGSGGGSG

SEQ ID NO: 77 - protein, 16 aa, Artificial Sequence
  Description of Artificial Sequence: Synthetic peptide
GGSGGGSGGGSGGGSG

SEQ ID NO: 78 - protein, 20 aa, Artificial Sequence
  Description of Artificial Sequence: Synthetic peptide
GGSGGGSGGGSGGGSGGGSG

SEQ ID NO: 79 - protein, 10 aa, Artificial Sequence
  Description of Artificial Sequence: Synthetic peptide
GGGGSGGGGS

SEQ ID NO: 80 - protein, 15 aa, Artificial Sequence
  Description of Artificial Sequence: Synthetic peptide
GGGGSGGGGSGGGGS

SEQ ID NO: 81 - protein, 8 aa, Artificial Sequence
  Description of Artificial Sequence: Synthetic peptide
ASHHHHHH

SEQ ID NO: 82 - protein, 6 aa, Artificial Sequence
  Description of Artificial Sequence: Synthetic 6xHis tag
HHHHHH

SEQ ID NO: 83 - DNA, 774 bp, Artificial Sequence
  Description of Artificial Sequence: Synthetic polynucleotide
caagtgcagctgcaagagagcggaggaggactggtccagcccggcggctctctgaggctgagctgcactgcttccggcttcagcttcagcagctaccctatgacatgggctaggcaagcccccggcaaaggactggaatgggtgagcactattgccagcgatggaggcagcacagcctacgctgccagcgtggagggaaggttcacaatctctagggacaatgccaagagcacactgtatctgcagctgaactctctgaagacagaggacactgccatgtactactgcactaagggctacggcgatggcacaccagctcccggccaaggcacacaagtgactgtctcgagcggcggaggatcccaagtgcagctgcaagagagcggaggaggaagcgtgcaagccggaggctctctgaggctgagctgtgccgcctctaggttcacatacagcagctactgcatgggctggttcagacaagcccccggcaaagagagagaaggcgtggccagcatcgatagcgatggctccactagctacactgacagcgtgaagggaaggttcactatcagcaaggacaacgccaagaacactctgtatctgcagatgaactctctgaagccagaggacacagccatgtactactgtgccctcgatctgatgagcacagtggtgcccggcttctgtggctttctgctgagcgctggcatggattactggggcaagggcactcaagtgactgtctcgtctgctagccaccatcaccatcaccac

SEQ ID NO: 84 - DNA, 768 bp, Artificial Sequence
  Description of Artificial Sequence: Synthetic polynucleotide
caagtgcagctgcaagagagcggaggaggactggtccagcccggcggctctctgaggctgagctgcactgcttccggcttcagcttcagcagctaccctatgacatgggctaggcaagcccccggcaaaggactggaatgggtgagcactattgccagcgatggaggcagcacagcctacgctgccagcgtggagggaaggttcacaatctctagggacaatgccaagagcacactgtatctgcagctgaactctctgaagacagaggacactgccatgtactactgcactaagggctacggcgatggcacaccagctcccggccaaggcacacaagtgactgtctcgagcggcggaggatcccaagtgcagctgcaagagagcggaggaggaagcgtgcaagccggaggctctctgaggctgagctgtacagtgtccggctacacttacagctccaattgcatgggctggtttaggcaagcccccggcaaggaaagagagggcgtggccactatctacactggcggcggcaacacatactacgccgatagcgtgaagggaaggttcactatcagccaagataacgccaagaacacagtgtatctgcagatgaacaatctgaagccagaggacactgccatgtactactgtgctgctgagccactgtctagggtgtacggcggcagctgcccaactcctacattcgactactggggccaaggcacacaagtgactgtctcgtctgctagccaccatcaccatcaccac

SEQ ID NO: 85 - DNA, 786 bp, Artificial Sequence
  Description of Artificial Sequence: Synthetic polynucleotide
caagtgcagctgcaagagagcggaggaggaagcgtgcaagccggaggctctctgagactgagctgtgccgcctctaggtatctgtacagcatcgactacatggcttggttcagacagagccccggcaaggagagggagccagtggctgtcatctacactgcctccggcgccacattctatccagatagcgtgaagggaaggttcactatcagccaagataacgccaagatgacagtgtatctgcagatgaactctctgaagagcgaggacactgccatgtactactgtgccgccgtgaggaagacagatagctacctcttcgacgcccagagcttcacatactggggccaaggcacacaagtgacagtctcgagcggcggaggatcccaagtgcagctgcaagagagcggaggcggaagcgtgcaagctggaggatctctgaggctgagctgcacagccagcggcttcactttcgatgacagcgacatgggctggtataggcaagcccccggcaatgagtgtgagctggtgagcacaatcagcagcgacggctccacttactacgccgacagcgtcaagggaaggttcacaatcagccaagataacgccaagaacactgtgtatctgcagatgaactctctgaagccagaggacacagccgtgtactactgtgctgccgagcctaggggctactatagcaactacggcggaaggagggagtgcaattactggggccaaggcacacaagtgacagtctcgtctgctagccaccatcaccatcaccac

SEQ ID NO: 86 - DNA, 792 bp, Artificial Sequence
  Description of Artificial Sequence: Synthetic polynucleotide
caagtgcagctgcaagagagcggaggaggaagcgtgcaagccggaggctctctgagactgagctgtgccgcctctaggtatctgtacagcatcgactacatggcttggttcagacagagccccggcaaggagagggagccagtggctgtcatctacactgcctccggcgccacattctatccagatagcgtgaagggaaggttcactatcagccaagataacgccaagatgacagtgtatctgcagatgaactctctgaagagcgaggacactgccatgtactactgtgccgccgtgaggaagacagatagctacctcttcgacgcccagagcttcacatactggggccaaggcacacaagtgacagtctcgagcggcggaggatcccaagtgcagctgcaagagagcggaggaggaagcgtgcaagccggaggctctctgaggctgagctgtgtggctagtggctacactttcagcagctactgcatgggctggttcagacaagcccccggcaaggaaagggaaggagtggccgctctgggcggaggaagcacatactacgctgacagcgtgaagggaaggttcacaatcagccaagataacgccaagaacacactgtatctgcagatgaactctctgaagccagaggacacagccatgtactactgtgccgctgcttgggtcgcttgtctggagttcggcggcagctggtacgatctggctaggtacaagcactggggccaaggcacacaagtgacagtctcgtctgctagccaccatcaccatcaccac

SEQ ID NO: 87 - DNA, 786 bp, Artificial Sequence
  Description of Artificial Sequence: Synthetic polynucleotide
caagtgcagctgcaagagagcggaggaggaagcgtgcaagccggaggctctctgaggctgagctgtgccgcctctaggttcacatacagcagctactgcatgggctggttcagacaagcccccggcaaagagagagaaggcgtggccagcatcgatagcgatggctccactagctacactgacagcgtgaagggaaggttcactatcagcaaggacaacgccaagaacactctgtatctgcagatgaactctctgaagccagaggacacagccatgtactactgtgccctcgatctgatgagcacagtggtgcccggcttctgtggctttctgctgagcgctggcatggattactggggcaagggcactcaagtgactgtctcgagcggcggaggatcccaagtgcagctgcaagagagcggaggaggaagcgtgcaagccggcggatctctgagactcagctgtactgcctccggcttcacattcgacgatagggagatgaactggtataggcaagcccccggcaatgagtgcgagctggtgagcacaatctccagcgatggcagcacttactacgccgatagcgtgaagggaaggttcactatctcccaagataacgccaagaacacagtctatctgcagatggactccgtcaagccagaggatactgccgtgtactactgcgccgccgacttcatgatcgccatccaagcccccggcgctggctgttggggacaaggcactcaagtgacagtctcgtctgctagccaccatcaccatcaccac

SEQ ID NO: 88 - DNA, 780 bp, Artificial Sequence
  Description of Artificial Sequence: Synthetic polynucleotide
caagtgcagctgcaagagagcggaggaggaagcgtgcaagccggaggctctctgaggctgagctgtgccgcctctaggttcacatacagcagctactgcatgggctggttcagacaagcccccggcaaagagagagaaggcgtggccagcatcgatagcgatggctccactagctacactgacagcgtgaagggaaggttcactatcagcaaggacaacgccaagaacactctgtatctgcagatgaactctctgaagccagaggacacagccatgtactactgtgccctcgatctgatgagcacagtggtgcccggcttctgtggctttctgctgagcgctggcatggattactggggcaagggcactcaagtgactgtctcgagcggcggaggatcccaagtgcagctgcaagagagcggaggaggcagcgtgcaagccggaggctctctgagactgagctgtgtggctagtggctacacaagctgcatgggctggtttaggcaagcccccggcaaggagagagaggccgtggccacaatctacactaggggaaggagcatctactacgccgacagcgtgaaaggaaggttcacaatcagccaagataacgccaagaacactctgtatctgcagatgaacagcctcaagccagaggacatcgccatgtatagctgtgctgctggcggctatagctggagcgctggctgcgagttcaattactggggccaaggcacacaagtgactgtctcgtctgctagccaccatcaccatcaccac

SEQ ID NO: 89 - DNA, 804 bp, Artificial Sequence
  Description of Artificial Sequence: Synthetic polynucleotide
caagtgcagctgcaagagagcggaggaggaagcgtgcaagccggaggctctctgaggctgagctgtgccgcctctaggttcacatacagcagctactgcatgggctggttcagacaagcccccggcaaagagagagaaggcgtggccagcatcgatagcgatggctccactagctacactgacagcgtgaagggaaggttcactatcagcaaggacaacgccaagaacactctgtatctgcagatgaactctctgaagccagaggacacagccatgtactactgtgccctcgatctgatgagcacagtggtgcccggcttctgtggctttctgctgagcgctggcatggattactggggcaagggcactcaagtgactgtctcgagcggcggaggatcccaagtgcagctgcaagagagcggaggaggaagcgtgcaagccggaggctctctgaggctgagctgtgtggctagtggctacactttcagcagctactgcatgggctggttcagacaagcccccggcaaggaaagggaaggagtggccgctctgggcggaggaagcacatactacgctgacagcgtgaagggaaggttcacaatcagccaagataacgccaagaacacactgtatctgcagatgaactctctgaagccagaggacacagccatgtactactgtgccgctgcttgggtcgcttgtctggagttcggcggcagctggtacgatctggctaggtacaagcactggggccaaggcacacaagtgacagtctcgtctgctagccaccatcaccatcaccac

SEQ ID NO: 90 - DNA, 804 bp, Artificial Sequence
  Description of Artificial Sequence: Synthetic polynucleotide
caagtgcagctgcaagagtccggaggaggcagcgtccaagccggaggctctctgaggctgagctgtgctgccagcggctacacttacagcatgtactgcatgggctggttcagacaagcccccggcaaggaaagagagggcgtggcccagatcaatagcgatggcagcacaagctacgccgacagcgtgaagggaaggttcactatctccaaggacaacgccaagaacactctgtatctgcagatgaactctctgaagccagaggacactgccatgtactactgcgctgccgattctagggtgtacggcggcagctggtatgagaggctctgcggcccttacacatacgagtacaactactggggccaaggcacacaagtgactgtctcgagcggcggaggatcccaagtgcagctgcaagagagcggaggcggaagcgtgcaagctggaggatctctgaggctgagctgcacagccagcggcttcactttcgatgacagcgacatgggctggtataggcaagcccccggcaatgagtgtgagctggtgagcacaatcagcagcgacggctccacttactacgccgacagcgtcaagggaaggttcacaatcagccaagataacgccaagaacactgtgtatctgcagatgaactctctgaagccagaggacacagccgtgtactactgtgctgccgagcctaggggctactatagcaactacggcggaaggagggagtgcaattactggggccaaggcacacaagtgacagtctcgtctgctagccaccatcaccatcaccac

SEQ ID NO: 91 - DNA, 777 bp, Artificial Sequence
  Description of Artificial Sequence: Synthetic polynucleotide
caagtgcagctgcaagagagcggaggaggaagcgtccaagccggaggctctctgaggctgagctgtggagccagcggctacacttacagcagctactgtatgggctggtttaggcaagtgcccggcaaggagagagagggcgtggccgtgatcgattccgatggcagcacaagctacgctgacagcgtgaagggaaggttcacaatcagcaaggacaacggcaagaacacactctatctgcagatgaacagcctcaagccagaggacacagccatgtactactgcgccgctgatctgggccactataggcctccttgtggcgtgctgtatctgggcatggattactggggcaagggcacacaagtgacagtctcgagcggcggaggatcccaagtgcagctgcaagagagcggaggaggaagcgtgcaagccggcggatctctgagactcagctgtactgcctccggcttcacattcgacgatagggagatgaactggtataggcaagcccccggcaatgagtgcgagctggtgagcacaatctccagcgatggcagcacttactacgccgatagcgtgaagggaaggttcactatctcccaagataacgccaagaacacagtctatctgcagatggactccgtcaagccagaggatactgccgtgtactactgcgccgccgacttcatgatcgccatccaagcccccggcgctggctgttggggacaaggcactcaagtgacagtctcgtctgctagccaccatcaccatcaccac

SEQ ID NO: 92 - DNA, 771 bp, Artificial Sequence
  Description of Artificial Sequence: Synthetic polynucleotide
caagtgcagctgcaagagagcggaggaggaagcgtccaagccggaggctctctgaggctgagctgtggagccagcggctacacttacagcagctactgtatgggctggtttaggcaagtgcccggcaaggagagagagggcgtggccgtgatcgattccgatggcagcacaagctacgctgacagcgtgaagggaaggttcacaatcagcaaggacaacggcaagaacacactctatctgcagatgaacagcctcaagccagaggacacagccatgtactactgcgccgctgatctgggccactataggcctccttgtggcgtgctgtatctgggcatggattactggggcaagggcacacaagtgacagtctcgagcggcggaggatcccaagtgcagctgcaagagagcggaggaggcagcgtgcaagccggaggctctctgagactgagctgtgtggctagtggctacacaagctgcatgggctggtttaggcaagcccccggcaaggagagagaggccgtggccacaatctacactaggggaaggagcatctactacgccgacagcgtgaaaggaaggttcacaatcagccaagataacgccaagaacactctgtatctgcagatgaacagcctcaagccagaggacatcgccatgtatagctgtgctgctggcggctatagctggagcgctggctgcgagttcaattactggggccaaggcacacaagtgactgtctcgtctgctagccaccatcaccatcaccac

SEQ ID NO: 93 - DNA, 795 bp, Artificial Sequence
  Description of Artificial Sequence: Synthetic polynucleotide
caagtgcagctgcaagagagcggaggaggaagcgtccaagccggaggctctctgaggctgagctgtggagccagcggctacacttacagcagctactgtatgggctggtttaggcaagtgcccggcaaggagagagagggcgtggccgtgatcgattccgatggcagcacaagctacgctgacagcgtgaagggaaggttcacaatcagcaaggacaacggcaagaacacactctatctgcagatgaacagcctcaagccagaggacacagccatgtactactgcgccgctgatctgggccactataggcctccttgtggcgtgctgtatctgggcatggattactggggcaagggcacacaagtgacagtctcgagcggcggaggatcccaagtgcagctgcaagagagcggaggaggaagcgtgcaagccggaggctctctgaggctgagctgtgtggctagtggctacactttcagcagctactgcatgggctggttcagacaagcccccggcaaggaaagggaaggagtggccgctctgggcggaggaagcacatactacgctgacagcgtgaagggaaggttcacaatcagccaagataacgccaagaacacactgtatctgcagatgaactctctgaagccagaggacacagccatgtactactgtgccgctgcttgggtcgcttgtctggagttcggcggcagctggtacgatctggctaggtacaagcactggggccaaggcacacaagtgacagtctcgtctgctagccaccatcaccatcaccac

SEQ ID NO: 94 - DNA, 780 bp, Artificial Sequence
  Description of Artificial Sequence: Synthetic polynucleotide
caagtgcagctgcaagagagcggaggaggaagcgtccaagccggaggctctctgagactgagctgtgccgccagcggctactccaactgcagctacgacatgacttggtataggcaagcccccggcaaggagagggagttcgtgtccgccatccacagcgacggcagcactagatacgccgacagcgtgaagggaaggttcttcatcagccaagataacgccaagaacacagtgtatctgcagatgaactccctcaagccagaggacactgccatgtactactgcaagacagacccactgcactgcagagcccatggcggcagctggtatagcgtgagggccaactactggggccaaggcacacaagtgacagtctcgagcggcggaggatcccaagtgcagctgcaagagagcggaggaggaagcgtgcaagccggcggatctctgagactcagctgtactgcctccggcttcacattcgacgatagggagatgaactggtataggcaagcccccggcaatgagtgcgagctggtgagcacaatctccagcgatggcagcacttactacgccgatagcgtgaagggaaggttcactatctcccaagataacgccaagaacacagtctatctgcagatggactccgtcaagccagaggatactgccgtgtactactgcgccgccgacttcatgatcgccatccaagcccccggcgctggctgttggggacaaggcactcaagtgacagtctcgtctgctagccaccatcaccatcaccac

SEQ ID NO: 95 - DNA, 798 bp, Artificial Sequence
  Description of Artificial Sequence: Synthetic polynucleotide
caagtgcagctgcaagagagcggaggaggaagcgtccaagccggaggctctctgagactgagctgtgccgccagcggctactccaactgcagctacgacatgacttggtataggcaagcccccggcaaggagagggagttcgtgtccgccatccacagcgacggcagcactagatacgccgacagcgtgaagggaaggttcttcatcagccaagataacgccaagaacacagtgtatctgcagatgaactccctcaagccagaggacactgccatgtactactgcaagacagacccactgcactgcagagcccatggcggcagctggtatagcgtgagggccaactactggggccaaggcacacaagtgacagtctcgagcggcggaggatcccaagtgcagctgcaagagagcggaggaggaagcgtgcaagccggaggctctctgaggctgagctgtgtggctagtggctacactttcagcagctactgcatgggctggttcagacaagcccccggcaaggaaagggaaggagtggccgctctgggcggaggaagcacatactacgctgacagcgtgaagggaaggttcacaatcagccaagataacgccaagaacacactgtatctgcagatgaactctctgaagccagaggacacagccatgtactactgtgccgctgcttgggtcgcttgtctggagttcggcggcagctggtacgatctggctaggtacaagcactggggccaaggcacacaagtgacagtctcgtctgctagccaccatcaccatcaccac

SEQ ID NO: 96 - protein, 254 aa, Artificial Sequence
  Description of Artificial Sequence: Synthetic polypeptide
QVQLQESGGGLVQPGGSLRLSCTASGFSFSSYPMTWARQAPGKGLEWVSTIASDGGSTAYAASVEGRFTISRDNAKSTLYLQLNSLKTEDTAMYYCTKGYGDGTPAPGQGTQVTVSSGGGSQVQLQESGGGSVQAGGSLRLSCAASRYLYSIDYMAWFRQSPGKEREPVAVIYTASGATFYPDSVKGRFTISQDNAKMTVYLQMNSLKSEDTAMYYCAAVRKTDSYLFDAQSFTYWGQGTQVTVSSASHHHHHH

SEQ ID NO: 97 - protein, 258 aa, Artificial Sequence; identical to SEQ ID NO: 60
  Description of Artificial Sequence: Synthetic polypeptide

SEQ ID NO: 98 - protein, 260 aa, Artificial Sequence
  Description of Artificial Sequence: Synthetic polypeptide
QVQLQESGGGLVQPGGSLRLSCTASGFSFSSYPMTWARQAPGKGLEWVSTIASDGGSTAYAASVEGRFTISRDNAKSTLYLQLNSLKTEDTAMYYCTKGYGDGTPAPGQGTQVTVSSGGGSQVQLQESGGGSVQAGGSLRLSCAASGYTYSMYCMGWFRQAPGKEREGVAQINSDGSTSYADSVKGRFTISKDNAKNTLYLQMNSLKPEDTAMYYCAADSRVYGGSWYERLCGPYTYEYNYWGQGTQVTVSSASHHHHHH

SEQ ID NO: 99 - protein, 263 aa, Artificial Sequence
  Description of Artificial Sequence: Synthetic polypeptide
QVQLQESGGGLVQPGGSLRLSCTASGFSFSSYPMTWARQAPGKGLEWVSTIASDGGSTAYAASVEGRFTISRDNAKSTLYLQLNSLKTEDTAMYYCTKGYGDGTPAPGQGTQVTVSSGGGSQVQLQESGGGSVQAGGSLRLSCAVSGYAYSTYCMGWFRQAPGKEREGVAAIDSGGSTSYADSVKGRFTISKDNAKNTLYLRMNSLKPEDTAMYYCAAVPPPPDGGSCLFLGPEIKVSKADFRYWGQGTQVTVSSASHHHHHH

SEQ ID NO: 100 - protein, 256 aa, Artificial Sequence; identical to SEQ ID NO: 61
  Description of Artificial Sequence: Synthetic polypeptide

SEQ ID NO: 101 - protein, 255 aa, Artificial Sequence
  Description of Artificial Sequence: Synthetic polypeptide
QVQLQESGGGLVQPGGSLRLSCTASGFSFSSYPMTWARQAPGKGLEWVSTIASDGGSTAYAASVEGRFTISRDNAKSTLYLQLNSLKTEDTAMYYCTKGYGDGTPAPGQGTQVTVSSGGGSQVQLQESGGGSVQAGGSLRLSCGASGYTYSSYCMGWFRQVPGKEREGVAVIDSDGSTSYADSVKGRFTISKDNGKNTLYLQMNSLKPEDTAMYYCAADLGHYRPPCGVLYLGMDYWGKGTQVTVSSASHHHHHH

SEQ ID NO: 102 - protein, 256 aa, Artificial Sequence
  Description of Artificial Sequence: Synthetic polypeptide
QVQLQESGGGLVQPGGSLRLSCTASGFSFSSYPMTWARQAPGKGLEWVSTIASDGGSTAYAASVEGRFTISRDNAKSTLYLQLNSLKTEDTAMYYCTKGYGDGTPAPGQGTQVTVSSGGGSQVQLQESGGGSVQAGGSLRLSCAASGYSNCSYDMTWYRQAPGKEREFVSAIHSDGSTRYADSVKGRFFISQDNAKNTVYLQMNSLKPEDTAMYYCKTDPLHCRAHGGSWYSVRANYWGQGTQVTVSSASHHHHHH

SEQ ID NO: 103 - protein, 257 aa, Artificial Sequence
  Description of Artificial Sequence: Synthetic polypeptide
QVQLQESGGGLVQPGGSLRLSCAASGFTFSSAHMSWVRQAPGKGREWIASIYSGGGTFYADSVKGRFTISRDNAKNTLYLQLNSLKAEDTAMYYCATNRLHYYSDDDSLRGQGTQVTVSSGGGSQVQLQESGGGSVQAGGSLRLSCAASRYLYSIDYMAWFRQSPGKEREPVAVIYTASGATFYPDSVKGRFTISQDNAKMTVYLQMNSLKSEDTAMYYCAAVRKTDSYLFDAQSFTYWGQGTQVTVSSASHHHHHH

SEQ ID NO: 104 - protein, 261 aa, Artificial Sequence
  Description of Artificial Sequence: Synthetic polypeptide
QVQLQESGGGLVQPGGSLRLSCAASGFTFSSAHMSWVRQAPGKGREWIASIYSGGGTFYADSVKGRFTISRDNAKNTLYLQLNSLKAEDTAMYYCATNRLHYYSDDDSLRGQGTQVTVSSGGGSQVQLQESGGGSVQAGGSLRLSCAASRFTYSSYCMGWFRQAPGKEREGVASIDSDGSTSYTDSVKGRFTISKDNAKNTLYLQMNSLKPEDTAMYYCALDLMSTVVPGFCGFLLSAGMDYWGKGTQVTVSSASHHHHHH

SEQ ID NO: 105 - protein, 263 aa, Artificial Sequence
  Description of Artificial Sequence: Synthetic polypeptide
QVQLQESGGGLVQPGGSLRLSCAASGFTFSSAHMSWVRQAPGKGREWIASIYSGGGTFYADSVKGRFTISRDNAKNTLYLQLNSLKAEDTAMYYCATNRLHYYSDDDSLRGQGTQVTVSSGGGSQVQLQESGGGSVQAGGSLRLSCAASGYTYSMYCMGWFRQAPGKEREGVAQINSDGSTSYADSVKGRFTISKDNAKNTLYLQMNSLKPEDTAMYYCAADSRVYGGSWYERLCGPYTYEYNYWGQGTQVTVSSASHHHHHH

SEQ ID NO: 106 - protein, 266 aa, Artificial Sequence
  Description of Artificial Sequence: Synthetic polypeptide
QVQLQESGGGLVQPGGSLRLSCAASGFTFSSAHMSWVRQAPGKGREWIASIYSGGGTFYADSVKGRFTISRDNAKNTLYLQLNSLKAEDTAMYYCATNRLHYYSDDDSLRGQGTQVTVSSGGGSQVQLQESGGGSVQAGGSLRLSCAVSGYAYSTYCMGWFRQAPGKEREGVAAIDSGGSTSYADSVKGRFTISKDNAKNTLYLRMNSLKPEDTAMYYCAAVPPPPDGGSCLFLGPEIKVSKADFRYWGQGTQVTVSSASHHHHHH

SEQ ID NO: 107 - protein, 259 aa, Artificial Sequence
  Description of Artificial Sequence: Synthetic polypeptide
QVQLQESGGGLVQPGGSLRLSCAASGFTFSSAHMSWVRQAPGKGREWIASIYSGGGTFYADSVKGRFTISRDNAKNTLYLQLNSLKAEDTAMYYCATNRLHYYSDDDSLRGQGTQVTVSSGGGSQVQLQESGGGSVQAGGSLRLSCTVSGYTYSSNCMGWFRQAPGKEREGVATIYTGGGNTYYADSVKGRFTISQDNAKNTVYLQMNNLKPEDTAMYYCAAEPLSRVYGGSCPTPTFDYWGQGTQVTVSSASHHHHHH

SEQ ID NO: 108 - protein, 258 aa, Artificial Sequence
  Description of Artificial Sequence: Synthetic polypeptide
QVQLQESGGGLVQPGGSLRLSCAASGFTFSSAHMSWVRQAPGKGREWIASIYSGGGTFYADSVKGRFTISRDNAKNTLYLQLNSLKAEDTAMYYCATNRLHYYSDDDSLRGQGTQVTVSSGGGSQVQLQESGGGSVQAGGSLRLSCGASGYTYSSYCMGWFRQVPGKEREGVAVIDSDGSTSYADSVKGRFTISKDNGKNTLYLQMNSLKPEDTAMYYCAADLGHYRPPCGVLYLGMDYWGKGTQVTVSSASHHHHHH

SEQ ID NO: 109 - protein, 259 aa, Artificial Sequence
  Description of Artificial Sequence: Synthetic polypeptide
QVQLQESGGGLVQPGGSLRLSCAASGFTFSSAHMSWVRQAPGKGREWIASIYSGGGTFYADSVKGRFTISRDNAKNTLYLQLNSLKAEDTAMYYCATNRLHYYSDDDSLRGQGTQVTVSSGGGSQVQLQESGGGSVQAGGSLRLSCAASGYSNCSYDMTWYRQAPGKEREFVSAIHSDGSTRYADSVKGRFFISQDNAKNTVYLQMNSLKPEDTAMYYCKTDPLHCRAHGGSWYSVRANYWGQGTQVTVSSASHHHHHH

SEQ ID NO: 110 - protein, 258 aa, Artificial Sequence
  Description of Artificial Sequence: Synthetic polypeptide
QVQLQESGGGSVQAGGSLRLSCTASGFTFDDREMNWYRQAPGNECELVSTISSDGSTYYADSVKGRFTISQDNAKNTVYLQMDSVKPEDTAVYYCAADFMIAIQAPGAGCWGQGTQVTVSSGGGSQVQLQESGGGSVQAGGSLRLSCAASRYLYSIDYMAWFRQSPGKEREPVAVIYTASGATFYPDSVKGRFTISQDNAKMTVYLQMNSLKSEDTAMYYCAAVRKTDSYLFDAQSFTYWGQGTQVTVSSASHHHHHH

SEQ ID NO: 111 - protein, 262 aa, Artificial Sequence
  Description of Artificial Sequence: Synthetic polypeptide
QVQLQESGGGSVQAGGSLRLSCTASGFTFDDREMNWYRQAPGNECELVSTISSDGSTYYADSVKGRFTISQDNAKNTVYLQMDSVKPEDTAVYYCAADFMIAIQAPGAGCWGQGTQVTVSSGGGSQVQLQESGGGSVQAGGSLRLSCAASRFTYSSYCMGWFRQAPGKEREGVASIDSDGSTSYTDSVKGRFTISKDNAKNTLYLQMNSLKPEDTAMYYCALDLMSTVVPGFCGFLLSAGMDYWGKGTQVTVSSASHHHHHH

SEQ ID NO: 112 - protein, 264 aa, Artificial Sequence
  Description of Artificial Sequence: Synthetic polypeptide
QVQLQESGGGSVQAGGSLRLSCTASGFTFDDREMNWYRQAPGNECELVSTISSDGSTYYADSVKGRFTISQDNAKNTVYLQMDSVKPEDTAVYYCAADFMIAIQAPGAGCWGQGTQVTVSSGGGSQVQLQESGGGSVQAGGSLRLSCAASGYTYSMYCMGWFRQAPGKEREGVAQINSDGSTSYADSVKGRFTISKDNAKNTLYLQMNSLKPEDTAMYYCAADSRVYGGSWYERLCGPYTYEYNYWGQGTQVTVSSASHHHHHH

SEQ ID NO: 113 - protein, 267 aa, Artificial Sequence
  Description of Artificial Sequence: Synthetic polypeptide
QVQLQESGGGSVQAGGSLRLSCTASGFTFDDREMNWYRQAPGNECELVSTISSDGSTYYADSVKGRFTISQDNAKNTVYLQMDSVKPEDTAVYYCAADFMIAIQAPGAGCWGQGTQVTVSSGGGSQVQLQESGGGSVQAGGSLRLSCAVSGYAYSTYCMGWFRQAPGKEREGVAAIDSGGSTSYADSVKGRFTISKDNAKNTLYLRMNSLKPEDTAMYYCAAVPPPPDGGSCLFLGPEIKVSKADFRYWGQGTQVTVSSASHHHHHH

SEQ ID NO: 114 - protein, 260 aa, Artificial Sequence
  Description of Artificial Sequence: Synthetic polypeptide
QVQLQESGGGSVQAGGSLRLSCTASGFTFDDREMNWYRQAPGNECELVSTISSDGSTYYADSVKGRFTISQDNAKNTVYLQMDSVKPEDTAVYYCAADFMIAIQAPGAGCWGQGTQVTVSSGGGSQVQLQESGGGSVQAGGSLRLSCTVSGYTYSSNCMGWFRQAPGKEREGVATIYTGGGNTYYADSVKGRFTISQDNAKNTVYLQMNNLKPEDTAMYYCAAEPLSRVYGGSCPTPTFDYWGQGTQVTVSSASHHHHHH

SEQ ID NO: 115 - protein, 259 aa, Artificial Sequence
  Description of Artificial Sequence: Synthetic polypeptide
QVQLQESGGGSVQAGGSLRLSCTASGFTFDDREMNWYRQAPGNECELVSTISSDGSTYYADSVKGRFTISQDNAKNTVYLQMDSVKPEDTAVYYCAADFMIAIQAPGAGCWGQGTQVTVSSGGGSQVQLQESGGGSVQAGGSLRLSCGASGYTYSSYCMGWFRQVPGKEREGVAVIDSDGSTSYADSVKGRFTISKDNGKNTLYLQMNSLKPEDTAMYYCAADLGHYRPPCGVLYLGMDYWGKGTQVTVSSASHHHHHH

SEQ ID NO: 116 - protein, 260 aa, Artificial Sequence
  Description of Artificial Sequence: Synthetic polypeptide
QVQLQESGGGSVQAGGSLRLSCTASGFTFDDREMNWYRQAPGNECELVSTISSDGSTYYADSVKGRFTISQDNAKNTVYLQMDSVKPEDTAVYYCAADFMIAIQAPGAGCWGQGTQVTVSSGGGSQVQLQESGGGSVQAGGSLRLSCAASGYSNCSYDMTWYRQAPGKEREFVSAIHSDGSTRYADSVKGRFFISQDNAKNTVYLQMNSLKPEDTAMYYCKTDPLHCRAHGGSWYSVRANYWGQGTQVTVSSASHHHHHH

SEQ ID NO: 117 - protein, 256 aa, Artificial Sequence
  Description of Artificial Sequence: Synthetic polypeptide
QVQLQESGGGSVQAGGSLRLSCVASGYTSCMGWFRQAPGKEREAVATIYTRGRSIYYADSVKGRFTISQDNAKNTLYLQMNSLKPEDIAMYSCAAGGYSWSAGCEFNYWGQGTQVTVSSGGGSQVQLQESGGGSVQAGGSLRLSCAASRYLYSIDYMAWFRQSPGKEREPVAVIYTASGATFYPDSVKGRFTISQDNAKMTVYLQMNSLKSEDTAMYYCAAVRKTDSYLFDAQSFTYWGQGTQVTVSSASHHHHHH

SEQ ID NO: 118 - protein, 260 aa, Artificial Sequence
  Description of Artificial Sequence: Synthetic polypeptide
QVQLQESGGGSVQAGGSLRLSCVASGYTSCMGWFRQAPGKEREAVATIYTRGRSIYYADSVKGRFTISQDNAKNTLYLQMNSLKPEDIAMYSCAAGGYSWSAGCEFNYWGQGTQVTVSSGGGSQVQLQESGGGSVQAGGSLRLSCAASRFTYSSYCMGWFRQAPGKEREGVASIDSDGSTSYTDSVKGRFTISKDNAKNTLYLQMNSLKPEDTAMYYCALDLMSTVVPGFCGFLLSAGMDYWGKGTQVTVSSASHHHHHH

SEQ ID NO: 119 - protein, 262 aa, Artificial Sequence
  Description of Artificial Sequence: Synthetic polypeptide
QVQLQESGGGSVQAGGSLRLSCVASGYTSCMGWFRQAPGKEREAVATIYTRGRSIYYADSVKGRFTISQDNAKNTLYLQMNSLKPEDIAMYSCAAGGYSWSAGCEFNYWGQGTQVTVSSGGGSQVQLQESGGGSVQAGGSLRLSCAASGYTYSMYCMGWFRQAPGKEREGVAQINSDGSTSYADSVKGRFTISKDNAKNTLYLQMNSLKPEDTAMYYCAADSRVYGGSWYERLCGPYTYEYNYWGQGTQVTVSSASHHHHHH

SEQ ID NO: 120 - protein, 265 aa, Artificial Sequence
  Description of Artificial Sequence: Synthetic polypeptide
QVQLQESGGGSVQAGGSLRLSCVASGYTSCMGWFRQAPGKEREAVATIYTRGRSIYYADSVKGRFTISQDNAKNTLYLQMNSLKPEDIAMYSCAAGGYSWSAGCEFNYWGQGTQVTVSSGGGSQVQLQESGGGSVQAGGSLRLSCAVSGYAYSTYCMGWFRQAPGKEREGVAAIDSGGSTSYADSVKGRFTISKDNAKNTLYLRMNSLKPEDTAMYYCAAVPPPPDGGSCLFLGPEIKVSKADFRYWGQGTQVTVSSASHHHHHH

SEQ ID NO: 121 - protein, 258 aa, Artificial Sequence
  Description of Artificial Sequence: Synthetic polypeptide
QVQLQESGGGSVQAGGSLRLSCVASGYTSCMGWFRQAPGKEREAVATIYTRGRSIYYADSVKGRFTISQDNAKNTLYLQMNSLKPEDIAMYSCAAGGYSWSAGCEFNYWGQGTQVTVSSGGGSQVQLQESGGGSVQAGGSLRLSCTVSGYTYSSNCMGWFRQAPGKEREGVATIYTGGGNTYYADSVKGRFTISQDNAKNTVYLQMNNLKPEDTAMYYCAAEPLSRVYGGSCPTPTFDYWGQGTQVTVSSASHHHHHH

SEQ ID NO: 122 - protein, 257 aa, Artificial Sequence
  Description of Artificial Sequence: Synthetic polypeptide
QVQLQESGGGSVQAGGSLRLSCVASGYTSCMGWFRQAPGKEREAVATIYTRGRSIYYADSVKGRFTISQDNAKNTLYLQMNSLKPEDIAMYSCAAGGYSWSAGCEFNYWGQGTQVTVSSGGGSQVQLQESGGGSVQAGGSLRLSCGASGYTYSSYCMGWFRQVPGKEREGVAVIDSDGSTSYADSVKGRFTISKDNGKNTLYLQMNSLKPEDTAMYYCAADLGHYRPPCGVLYLGMDYWGKGTQVTVSSASHHHHHH

SEQ ID NO: 123 - protein, 258 aa, Artificial Sequence
  Description of Artificial Sequence: Synthetic polypeptide
QVQLQESGGGSVQAGGSLRLSCVASGYTSCMGWFRQAPGKEREAVATIYTRGRSIYYADSVKGRFTISQDNAKNTLYLQMNSLKPEDIAMYSCAAGGYSWSAGCEFNYWGQGTQVTVSSGGGSQVQLQESGGGSVQAGGSLRLSCAASGYSNCSYDMTWYRQAPGKEREFVSAIHSDGSTRYADSVKGRFFISQDNAKNTVYLQMNSLKPEDTAMYYCKTDPLHCRAHGGSWYSVRANYWGQGTQVTVSSASHHHHHH

SEQ ID NO: 124 - protein, 262 aa, Artificial Sequence
  Description of Artificial Sequence: Synthetic polypeptide
QVQLQESGGGSVQAGGSLRLSCTASGFTFDDSDMGWYRQAPGNECELVSTISSDGSTYYADSVKGRFTISQDNAKNTVYLQMNSLKPEDTAVYYCAAEPRGYYSNYGGRRECNYWGQGTQVTVSSGGGSQVQLQESGGGSVQAGGSLRLSCAASRYLYSIDYMAWFRQSPGKEREPVAVIYTASGATFYPDSVKGRFTISQDNAKMTVYLQMNSLKSEDTAMYYCAAVRKTDSYLFDAQSFTYWGQGTQVTVSSASHHHHHH

SEQ ID NO: 125 - protein, 266 aa, Artificial Sequence
  Description of Artificial Sequence: Synthetic polypeptide
QVQLQESGGGSVQAGGSLRLSCTASGFTFDDSDMGWYRQAPGNECELVSTISSDGSTYYADSVKGRFTISQDNAKNTVYLQMNSLKPEDTAVYYCAAEPRGYYSNYGGRRECNYWGQGTQVTVSSGGGSQVQLQESGGGSVQAGGSLRLSCAASRFTYSSYCMGWFRQAPGKEREGVASIDSDGSTSYTDSVKGRFTISKDNAKNTLYLQMNSLKPEDTAMYYCALDLMSTVVPGFCGFLLSAGMDYWGKGTQVTVSSASHHHHHH

SEQ ID NO: 126 - protein, 268 aa, Artificial Sequence
  Description of Artificial Sequence: Synthetic polypeptide
QVQLQESGGGSVQAGGSLRLSCTASGFTFDDSDMGWYRQAPGNECELVSTISSDGSTYYADSVKGRFTISQDNAKNTVYLQMNSLKPEDTAVYYCAAEPRGYYSNYGGRRECNYWGQGTQVTVSSGGGSQVQLQESGGGSVQAGGSLRLSCAASGYTYSMYCMGWFRQAPGKEREGVAQINSDGSTSYADSVKGRFTISKDNAKNTLYLQMNSLKPEDTAMYYCAADSRVYGGSWYERLCGPYTYEYNYWGQGTQVTVSSASHHHHHH

SEQ ID NO: 127 - protein, 271 aa, Artificial Sequence
  Description of Artificial Sequence: Synthetic polypeptide
QVQLQESGGGSVQAGGSLRLSCTASGFTFDDSDMGWYRQAPGNECELVSTISSDGSTYYADSVKGRFTISQDNAKNTVYLQMNSLKPEDTAVYYCAAEPRGYYSNYGGRRECNYWGQGTQVTVSSGGGSQVQLQESGGGSVQAGGSLRLSCAVSGYAYSTYCMGWFRQAPGKEREGVAAIDSGGSTSYADSVKGRFTISKDNAKNTLYLRMNSLKPEDTAMYYCAAVPPPPDGGSCLFLGPEIKVSKADFRYWGQGTQVTVSSASHHHHHH

SEQ ID NO: 128 - protein, 264 aa, Artificial Sequence
  Description of Artificial Sequence: Synthetic polypeptide
QVQLQESGGGSVQAGGSLRLSCTASGFTFDDSDMGWYRQAPGNECELVSTISSDGSTYYADSVKGRFTISQDNAKNTVYLQMNSLKPEDTAVYYCAAEPRGYYSNYGGRRECNYWGQGTQVTVSSGGGSQVQLQESGGGSVQAGGSLRLSCTVSGYTYSSNCMGWFRQAPGKEREGVATIYTGGGNTYYADSVKGRFTISQDNAKNTVYLQMNNLKPEDTAMYYCAAEPLSRVYGGSCPTPTFDYWGQGTQVTVSSASHHHHHH

SEQ ID NO: 129 - protein, 263 aa, Artificial Sequence
  Description of Artificial Sequence: Synthetic polypeptide
QVQLQESGGGSVQAGGSLRLSCTASGFTFDDSDMGWYRQAPGNECELVSTISSDGSTYYADSVKGRFTISQDNAKNTVYLQMNSLKPEDTAVYYCAAEPRGYYSNYGGRRECNYWGQGTQVTVSSGGGSQVQLQESGGGSVQAGGSLRLSCGASGYTYSSYCMGWFRQVPGKEREGVAVIDSDGSTSYADSVKGRFTISKDNGKNTLYLQMNSLKPEDTAMYYCAADLGHYRPPCGVLYLGMDYWGKGTQVTVSSASHHHHHH

SEQ ID NO: 130 - protein, 264 aa, Artificial Sequence
  Description of Artificial Sequence: Synthetic polypeptide
QVQLQESGGGSVQAGGSLRLSCTASGFTFDDSDMGWYRQAPGNECELVSTISSDGSTYYADSVKGRFTISQDNAKNTVYLQMNSLKPEDTAVYYCAAEPRGYYSNYGGRRECNYWGQGTQVTVSSGGGSQVQLQESGGGSVQAGGSLRLSCAASGYSNCSYDMTWYRQAPGKEREFVSAIHSDGSTRYADSVKGRFFISQDNAKNTVYLQMNSLKPEDTAMYYCKTDPLHCRAHGGSWYSVRANYWGQGTQVTVSSASHHHHHH

SEQ ID NO: 131 - protein, 264 aa, Artificial Sequence
  Description of Artificial Sequence: Synthetic polypeptide
QVQLQESGGGSVQAGGSLRLSCVASGYTFSSYCMGWFRQAPGKEREGVAALGGGSTYYADSVKGRFTISQDNAKNTLYLQMNSLKPEDTAMYYCAAAWVACLEFGGSWYDLARYKHWGQGTQVTVSSGGGSQVQLQESGGGSVQAGGSLRLSCAASRYLYSIDYMAWFRQSPGKEREPVAVIYTASGATFYPDSVKGRFTISQDNAKMTVYLQMNSLKSEDTAMYYCAAVRKTDSYLFDAQSFTYWGQGTQVTVSSASHHHHHH

SEQ ID NO: 132 - protein, 268 aa, Artificial Sequence
  Description of Artificial Sequence: Synthetic polypeptide
QVQLQESGGGSVQAGGSLRLSCVASGYTFSSYCMGWFRQAPGKEREGVAALGGGSTYYADSVKGRFTISQDNAKNTLYLQMNSLKPEDTAMYYCAAAWVACLEFGGSWYDLARYKHWGQGTQVTVSSGGGSQVQLQESGGGSVQAGGSLRLSCAASRFTYSSYCMGWFRQAPGKEREGVASIDSDGSTSYTDSVKGRFTISKDNAKNTLYLQMNSLKPEDTAMYYCALDLMSTVVPGFCGFLLSAGMDYWGKGTQVTVSSASHHHHHH

SEQ ID NO: 133 - protein, 270 aa, Artificial Sequence
  Description of Artificial Sequence: Synthetic polypeptide
QVQLQESGGGSVQAGGSLRLSCVASGYTFSSYCMGWFRQAPGKEREGVAALGGGSTYYADSVKGRFTISQDNAKNTLYLQMNSLKPEDTAMYYCAAAWVACLEFGGSWYDLARYKHWGQGTQVTVSSGGGSQVQLQESGGGSVQAGGSLRLSCAASGYTYSMYCMGWFRQAPGKEREGVAQINSDGSTSYADSVKGRFTISKDNAKNTLYLQMNSLKPEDTAMYYCAADSRVYGGSWYERLCGPYTYEYNYWGQGTQVTVSSASHHHHHH

SEQ ID NO: 134 - protein, 273 aa, Artificial Sequence
  Description of Artificial Sequence: Synthetic polypeptide
QVQLQESGGGSVQAGGSLRLSCVASGYTFSSYCMGWFRQAPGKEREGVAALGGGSTYYADSVKGRFTISQDNAKNTLYLQMNSLKPEDTAMYYCAAAWVACLEFGGSWYDLARYKHWGQGTQVTVSSGGGSQVQLQESGGGSVQAGGSLRLSCAVSGYAYSTYCMGWFRQAPGKEREGVAAIDSGGSTSYADSVKGRFTISKDNAKNTLYLRMNSLKPEDTAMYYCAAVPPPPDGGSCLFLGPEIKVSKADFRYWGQGTQVTVSSASHHHHHH

SEQ ID NO: 135 - protein, 266 aa, Artificial Sequence
  Description of Artificial Sequence: Synthetic polypeptide
QVQLQESGGGSVQAGGSLRLSCVASGYTFSSYCMGWFRQAPGKEREGVAALGGGSTYYADSVKGRFTISQDNAKNTLYLQMNSLKPEDTAMYYCAAAWVACLEFGGSWYDLARYKHWGQGTQVTVSSGGGSQVQLQESGGGSVQAGGSLRLSCTVSGYTYSSNCMGWFRQAPGKEREGVATIYTGGGNTYYADSVKGRFTISQDNAKNTVYLQMNNLKPEDTAMYYCAAEPLSRVYGGSCPTPTFDYWGQGTQVTVSSASHHHHHH

SEQ ID NO: 136 - protein, 265 aa, Artificial Sequence
  Description of Artificial Sequence: Synthetic polypeptide
QVQLQESGGGSVQAGGSLRLSCVASGYTFSSYCMGWFRQAPGKEREGVAALGGGSTYYADSVKGRFTISQDNAKNTLYLQMNSLKPEDTAMYYCAAAWVACLEFGGSWYDLARYKHWGQGTQVTVSSGGGSQVQLQESGGGSVQAGGSLRLSCGASGYTYSSYCMGWFRQVPGKEREGVAVIDSDGSTSYADSVKGRFTISKDNGKNTLYLQMNSLKPEDTAMYYCAADLGHYRPPCGVLYLGMDYWGKGTQVTVSSASHHHHHH

SEQ ID NO: 137 - protein, 266 aa, Artificial Sequence
  Description of Artificial Sequence: Synthetic polypeptide
QVQLQESGGGSVQAGGSLRLSCVASGYTFSSYCMGWFRQAPGKEREGVAALGGGSTYYADSVKGRFTISQDNAKNTLYLQMNSLKPEDTAMYYCAAAWVACLEFGGSWYDLARYKHWGQGTQVTVSSGGGSQVQLQESGGGSVQAGGSLRLSCAASGYSNCSYDMTWYRQAPGKEREFVSAIHSDGSTRYADSVKGRFFISQDNAKNTVYLQMNSLKPEDTAMYYCKTDPLHCRAHGGSWYSVRANYWGQGTQVTVSSASHHHHHH

SEQ ID NO: 138 - protein, 254 aa, Artificial Sequence
  Description of Artificial Sequence: Synthetic polypeptide
QVQLQESGGGSVQAGGSLRLSCAASRYLYSIDYMAWFRQSPGKEREPVAVIYTASGATFYPDSVKGRFTISQDNAKMTVYLQMNSLKSEDTAMYYCAAVRKTDSYLFDAQSFTYWGQGTQVTVSSGGGSQVQLQESGGGLVQPGGSLRLSCTASGFSFSSYPMTWARQAPGKGLEWVSTIASDGGSTAYAASVEGRFTISRDNAKSTLYLQLNSLKTEDTAMYYCTKGYGDGTPAPGQGTQVTVSSASHHHHHH

SEQ ID NO: 139 - protein, 257 aa, Artificial Sequence
  Description of Artificial Sequence: Synthetic polypeptide
QVQLQESGGGSVQAGGSLRLSCAASRYLYSIDYMAWFRQSPGKEREPVAVIYTASGATFYPDSVKGRFTISQDNAKMTVYLQMNSLKSEDTAMYYCAAVRKTDSYLFDAQSFTYWGQGTQVTVSSGGGSQVQLQESGGGLVQPGGSLRLSCAASGFTFSSAHMSWVRQAPGKGREWIASIYSGGGTFYADSVKGRFTISRDNAKNTLYLQLNSLKAEDTAMYYCATNRLHYYSDDDSLRGQGTQVTVSSASHHHHHH

SEQ ID NO: 140 - protein, 258 aa, Artificial Sequence
  Description of Artificial Sequence: Synthetic polypeptide
QVQLQESGGGSVQAGGSLRLSCAASRYLYSIDYMAWFRQSPGKEREPVAVIYTASGATFYPDSVKGRFTISQDNAKMTVYLQMNSLKSEDTAMYYCAAVRKTDSYLFDAQSFTYWGQGTQVTVSSGGGSQVQLQESGGGSVQAGGSLRLSCTASGFTFDDREMNWYRQAPGNECELVSTISSDGSTYYADSVKGRFTISQDNAKNTVYLQMDSVKPEDTAVYYCAADFMIAIQAPGAGCWGQGTQVTVSSASHHHHHH

SEQ ID NO: 141 - protein, 256 aa, Artificial Sequence
  Description of Artificial Sequence: Synthetic polypeptide
QVQLQESGGGSVQAGGSLRLSCAASRYLYSIDYMAWFRQSPGKEREPVAVIYTASGATFYPDSVKGRFTISQDNAKMTVYLQMNSLKSEDTAMYYCAAVRKTDSYLFDAQSFTYWGQGTQVTVSSGGGSQVQLQESGGGSVQAGGSLRLSCVASGYTSCMGWFRQAPGKEREAVATIYTRGRSIYYADSVKGRFTISQDNAKNTLYLQMNSLKPEDIAMYSCAAGGYSWSAGCEFNYWGQGTQVTVSSASHHHHHH

SEQ ID NO: 142 - protein, 262 aa, Artificial Sequence; identical to SEQ ID NO: 49
  Description of Artificial Sequence: Synthetic polypeptide

SEQ ID NO: 143 - protein, 264 aa, Artificial Sequence; identical to SEQ ID NO: 50
  Description of Artificial Sequence: Synthetic polypeptide

SEQ ID NO: 144 - protein, 258 aa, Artificial Sequence
  Description of Artificial Sequence: Synthetic polypeptide
QVQLQESGGGSVQAGGSLRLSCAASRFTYSSYCMGWFRQAPGKEREGVASIDSDGSTSYTDSVKGRFTISKDNAKNTLYLQMNSLKPEDTAMYYCALDLMSTVVPGFCGFLLSAGMDYWGKGTQVTVSSGGGSQVQLQESGGGLVQPGGSLRLSCTASGFSFSSYPMTWARQAPGKGLEWVSTIASDGGSTAYAASVEGRFTISRDNAKSTLYLQLNSLKTEDTAMYYCTKGYGDGTPAPGQGTQVTVSSASHHHHHH

SEQ ID NO: 145 - protein, 261 aa, Artificial Sequence
  Description of Artificial Sequence: Synthetic polypeptide
QVQLQESGGGSVQAGGSLRLSCAASRFTYSSYCMGWFRQAPGKEREGVASIDSDGSTSYTDSVKGRFTISKDNAKNTLYLQMNSLKPEDTAMYYCALDLMSTVVPGFCGFLLSAGMDYWGKGTQVTVSSGGGSQVQLQESGGGLVQPGGSLRLSCAASGFTFSSAHMSWVRQAPGKGREWIASIYSGGGTFYADSVKGRFTISRDNAKNTLYLQLNSLKAEDTAMYYCATNRLHYYSDDDSLRGQGTQVTVSSASHHHHHH

SEQ ID NO: 146 - protein, 262 aa, Artificial Sequence; identical to SEQ ID NO: 51
  Description of Artificial Sequence: Synthetic polypeptide

SEQ ID NO: 147 - protein, 260 aa, Artificial Sequence; identical to SEQ ID NO: 52
  Description of Artificial Sequence: Synthetic polypeptide

SEQ ID NO: 148 - protein, 266 aa, Artificial Sequence
  Description of Artificial Sequence: Synthetic polypeptide
QVQLQESGGGSVQAGGSLRLSCAASRFTYSSYCMGWFRQAPGKEREGVASIDSDGSTSYTDSVKGRFTISKDNAKNTLYLQMNSLKPEDTAMYYCALDLMSTVVPGFCGFLLSAGMDYWGKGTQVTVSSGGGSQVQLQESGGGSVQAGGSLRLSCTASGFTFDDSDMGWYRQAPGNECELVSTISSDGSTYYADSVKGRFTISQDNAKNTVYLQMNSLKPEDTAVYYCAAEPRGYYSNYGGRRECNYWGQGTQVTVSSASHHHHHH

SEQ ID NO: 149 - protein, 268 aa, Artificial Sequence; identical to SEQ ID NO: 53
  Description of Artificial Sequence: Synthetic polypeptide

SEQ ID NO: 150 - protein, 260 aa, Artificial Sequence
  Description of Artificial Sequence: Synthetic polypeptide
QVQLQESGGGSVQAGGSLRLSCAASGYTYSMYCMGWFRQAPGKEREGVAQINSDGSTSYADSVKGRFTISKDNAKNTLYLQMNSLKPEDTAMYYCAADSRVYGGSWYERLCGPYTYEYNYWGQGTQVTVSSGGGSQVQLQESGGGLVQPGGSLRLSCTASGFSFSSYPMTWARQAPGKGLEWVSTIASDGGSTAYAASVEGRFTISRDNAKSTLYLQLNSLKTEDTAMYYCTKGYGDGTPAPGQGTQVTVSSASHHHHHH

SEQ ID NO: 151 - protein, 263 aa, Artificial Sequence
  Description of Artificial Sequence: Synthetic polypeptide
QVQLQESGGGSVQAGGSLRLSCAASGYTYSMYCMGWFRQAPGKEREGVAQINSDGSTSYADSVKGRFTISKDNAKNTLYLQMNSLKPEDTAMYYCAADSRVYGGSWYERLCGPYTYEYNYWGQGTQVTVSSGGGSQVQLQESGGGLVQPGGSLRLSCAASGFTFSSAHMSWVRQAPGKGREWIASIYSGGGTFYADSVKGRFTISRDNAKNTLYLQLNSLKAEDTAMYYCATNRLHYYSDDDSLRGQGTQVTVSSASHHHHHH

SEQ ID NO: 152 - protein, 264 aa, Artificial Sequence
  Description of Artificial Sequence: Synthetic polypeptide
QVQLQESGGGSVQAGGSLRLSCAASGYTYSMYCMGWFRQAPGKEREGVAQINSDGSTSYADSVKGRFTISKDNAKNTLYLQMNSLKPEDTAMYYCAADSRVYGGSWYERLCGPYTYEYNYWGQGTQVTVSSGGGSQVQLQESGGGSVQAGGSLRLSCTASGFTFDDREMNWYRQAPGNECELVSTISSDGSTYYADSVKGRFTISQDNAKNTVYLQMDSVKPEDTAVYYCAADFMIAIQAPGAGCWGQGTQVTVSSASHHHHHH

SEQ ID NO: 153 - protein, 262 aa, Artificial Sequence
  Description of Artificial Sequence: Synthetic polypeptide
QVQLQESGGGSVQAGGSLRLSCAASGYTYSMYCMGWFRQAPGKEREGVAQINSDGSTSYADSVKGRFTISKDNAKNTLYLQMNSLKPEDTAMYYCAADSRVYGGSWYERLCGPYTYEYNYWGQGTQVTVSSGGGSQVQLQESGGGSVQAGGSLRLSCVASGYTSCMGWFRQAPGKEREAVATIYTRGRSIYYADSVKGRFTISQDNAKNTLYLQMNSLKPEDIAMYSCAAGGYSWSAGCEFNYWGQGTQVTVSSASHHHHHH

SEQ ID NO: 154 - protein, 268 aa, Artificial Sequence; identical to SEQ ID NO: 54
  Description of Artificial Sequence: Synthetic polypeptide

SEQ ID NO: 155 - protein, 270 aa, Artificial Sequence
  Description of Artificial Sequence: Synthetic polypeptide
QVQLQESGGGSVQAGGSLRLSCAASGYTYSMYCMGWFRQAPGKEREGVAQINSDGSTSYADSVKGRFTISKDNAKNTLYLQMNSLKPEDTAMYYCAADSRVYGGSWYERLCGPYTYEYNYWGQGTQVTVSSGGGSQVQLQESGGGSVQAGGSLRLSCVASGYTFSSYCMGWFRQAPGKEREGVAALGGGSTYYADSVKGRFTISQDNAKNTLYLQMNSLKPEDTAMYYCAAAWVACLEFGGSWYDLARYKHWGQGTQVTVSSASHHHHHH

SEQ ID NO: 156 - protein, 263 aa, Artificial Sequence
  Description of Artificial Sequence: Synthetic polypeptide
QVQLQESGGGSVQAGGSLRLSCAVSGYAYSTYCMGWFRQAPGKEREGVAAIDSGGSTSYADSVKGRFTISKDNAKNTLYLRMNSLKPEDTAMYYCAAVPPPPDGGSCLFLGPEIKVSKADFRYWGQGTQVTVSSGGGSQVQLQESGGGLVQPGGSLRLSCTASGFSFSSYPMTWARQAPGKGLEWVSTIASDGGSTAYAASVEGRFTISRDNAKSTLYLQLNSLKTEDTAMYYCTKGYGDGTPAPGQGTQVTVSSASHHHHHH

SEQ ID NO: 157 - protein, 266 aa, Artificial Sequence
  Description of Artificial Sequence: Synthetic polypeptide
QVQLQESGGGSVQAGGSLRLSCAVSGYAYSTYCMGWFRQAPGKEREGVAAIDSGGSTSYADSVKGRFTISKDNAKNTLYLRMNSLKPEDTAMYYCAAVPPPPDGGSCLFLGPEIKVSKADFRYWGQGTQVTVSSGGGSQVQLQESGGGLVQPGGSLRLSCAASGFTFSSAHMSWVRQAPGKGREWIASIYSGGGTFYADSVKGRFTISRDNAKNTLYLQLNSLKAEDTAMYYCATNRLHYYSDDDSLRGQGTQVTVSSASHHHHHH

SEQ ID NO: 158 - protein, 267 aa, Artificial Sequence
  Description of Artificial Sequence: Synthetic polypeptide
QVQLQESGGGSVQAGGSLRLSCAVSGYAYSTYCMGWFRQAPGKEREGVAAIDSGGSTSYADSVKGRFTISKDNAKNTLYLRMNSLKPEDTAMYYCAAVPPPPDGGSCLFLGPEIKVSKADFRYWGQGTQVTVSSGGGSQVQLQESGGGSVQAGGSLRLSCTASGFTFDDREMNWYRQAPGNECELVSTISSDGSTYYADSVKGRFTISQDNAKNTVYLQMDSVKPEDTAVYYCAADFMIAIQAPGAGCWGQGTQVTVSSASHHHHHH

SEQ ID NO: 159 - protein, 265 aa, Artificial Sequence
  Description of Artificial Sequence: Synthetic polypeptide
QVQLQESGGGSVQAGGSLRLSCAVSGYAYSTYCMGWFRQAPGKEREGVAAIDSGGSTSYADSVKGRFTISKDNAKNTLYLRMNSLKPEDTAMYYCAAVPPPPDGGSCLFLGPEIKVSKADFRYWGQGTQVTVSSGGGSQVQLQESGGGSVQAGGSLRLSCVASGYTSCMGWFRQAPGKEREAVATIYTRGRSIYYADSVKGRFTISQDNAKNTLYLQMNSLKPEDIAMYSCAAGGYSWSAGCEFNYWGQGTQVTVSSASHHHHHH

SEQ ID NO: 160 - protein, 271 aa, Artificial Sequence
  Description of Artificial Sequence: Synthetic polypeptide
QVQLQESGGGSVQAGGSLRLSCAVSGYAYSTYCMGWFRQAPGKEREGVAAIDSGGSTSYADSVKGRFTISKDNAKNTLYLRMNSLKPEDTAMYYCAAVPPPPDGGSCLFLGPEIKVSKADFRYWGQGTQVTVSSGGGSQVQLQESGGGSVQAGGSLRLSCTASGFTFDDSDMGWYRQAPGNECELVSTISSDGSTYYADSVKGRFTISQDNAKNTVYLQMNSLKPEDTAVYYCAAEPRGYYSNYGGRRECNYWGQGTQVTVSSASHHHHHH

SEQ ID NO: 161 - protein, 273 aa, Artificial Sequence
  Description of Artificial Sequence: Synthetic polypeptide
QVQLQESGGGSVQAGGSLRLSCAVSGYAYSTYCMGWFRQAPGKEREGVAAIDSGGSTSYADSVKGRFTISKDNAKNTLYLRMNSLKPEDTAMYYCAAVPPPPDGGSCLFLGPEIKVSKADFRYWGQGTQVTVSSGGGSQVQLQESGGGSVQAGGSLRLSCVASGYTFSSYCMGWFRQAPGKEREGVAALGGGSTYYADSVKGRFTISQDNAKNTLYLQMNSLKPEDTAMYYCAAAWVACLEFGGSWYDLARYKHWGQGTQVTVSSASHHHHHH

SEQ ID NO: 162 - protein, 256 aa, Artificial Sequence
  Description of Artificial Sequence: Synthetic polypeptide
QVQLQESGGGSVQAGGSLRLSCTVSGYTYSSNCMGWFRQAPGKEREGVATIYTGGGNTYYADSVKGRFTISQDNAKNTVYLQMNNLKPEDTAMYYCAAEPLSRVYGGSCPTPTFDYWGQGTQVTVSSGGGSQVQLQESGGGLVQPGGSLRLSCTASGFSFSSYPMTWARQAPGKGLEWVSTIASDGGSTAYAASVEGRFTISRDNAKSTLYLQLNSLKTEDTAMYYCTKGYGDGTPAPGQGTQVTVSSASHHHHHH

SEQ ID NO: 163 - protein, 259 aa, Artificial Sequence
  Description of Artificial Sequence: Synthetic polypeptide
QVQLQESGGGSVQAGGSLRLSCTVSGYTYSSNCMGWFRQAPGKEREGVATIYTGGGNTYYADSVKGRFTISQDNAKNTVYLQMNNLKPEDTAMYYCAAEPLSRVYGGSCPTPTFDYWGQGTQVTVSSGGGSQVQLQESGGGLVQPGGSLRLSCAASGFTFSSAHMSWVRQAPGKGREWIASIYSGGGTFYADSVKGRFTISRDNAKNTLYLQLNSLKAEDTAMYYCATNRLHYYSDDDSLRGQGTQVTVSSASHHHHHH

SEQ ID NO: 164 - protein, 260 aa, Artificial Sequence
  Description of Artificial Sequence: Synthetic polypeptide
QVQLQESGGGSVQAGGSLRLSCTVSGYTYSSNCMGWFRQAPGKEREGVATIYTGGGNTYYADSVKGRFTISQDNAKNTVYLQMNNLKPEDTAMYYCAAEPLSRVYGGSCPTPTFDYWGQGTQVTVSSGGGSQVQLQESGGGSVQAGGSLRLSCTASGFTFDDREMNWYRQAPGNECELVSTISSDGSTYYADSVKGRFTISQDNAKNTVYLQMDSVKPEDTAVYYCAADFMIAIQAPGAGCWGQGTQVTVSSASHHHHHH

SEQ ID NO: 165 - protein, 258 aa, Artificial Sequence
  Description of Artificial Sequence: Synthetic polypeptide
QVQLQESGGGSVQAGGSLRLSCTVSGYTYSSNCMGWFRQAPGKEREGVATIYTGGGNTYYADSVKGRFTISQDNAKNTVYLQMNNLKPEDTAMYYCAAEPLSRVYGGSCPTPTFDYWGQGTQVTVSSGGGSQVQLQESGGGSVQAGGSLRLSCVASGYTSCMGWFRQAPGKEREAVATIYTRGRSIYYADSVKGRFTISQDNAKNTLYLQMNSLKPEDIAMYSCAAGGYSWSAGCEFNYWGQGTQVTVSSASHHHHHH

SEQ ID NO: 166 - protein, 264 aa, Artificial Sequence
  Description of Artificial Sequence: Synthetic polypeptide
QVQLQESGGGSVQAGGSLRLSCTVSGYTYSSNCMGWFRQAPGKEREGVATIYTGGGNTYYADSVKGRFTISQDNAKNTVYLQMNNLKPEDTAMYYCAAEPLSRVYGGSCPTPTFDYWGQGTQVTVSSGGGSQVQLQESGGGSVQAGGSLRLSCTASGFTFDDSDMGWYRQAPGNECELVSTISSDGSTYYADSVKGRFTISQDNAKNTVYLQMNSLKPEDTAVYYCAAEPRGYYSNYGGRRECNYWGQGTQVTVSSASHHHHHH

SEQ ID NO: 167 - protein, 266 aa, Artificial Sequence
  Description of Artificial Sequence: Synthetic polypeptide
QVQLQESGGGSVQAGGSLRLSCTVSGYTYSSNCMGWFRQAPGKEREGVATIYTGGGNTYYADSVKGRFTISQDNAKNTVYLQMNNLKPEDTAMYYCAAEPLSRVYGGSCPTPTFDYWGQGTQVTVSSGGGSQVQLQESGGGSVQAGGSLRLSCVASGYTFSSYCMGWFRQAPGKEREGVAALGGGSTYYADSVKGRFTISQDNAKNTLYLQMNSLKPEDTAMYYCAAAWVACLEFGGSWYDLARYKHWGQGTQVTVSSASHHHHHH

SEQ ID NO: 168 - protein, 255 aa, Artificial Sequence
  Description of Artificial Sequence: Synthetic polypeptide
QVQLQESGGGSVQAGGSLRLSCGASGYTYSSYCMGWFRQVPGKEREGVAVIDSDGSTSYADSVKGRFTISKDNGKNTLYLQMNSLKPEDTAMYYCAADLGHYRPPCGVLYLGMDYWGKGTQVTVSSGGGSQVQLQESGGGLVQPGGSLRLSCTASGFSFSSYPMTWARQAPGKGLEWVSTIASDGGSTAYAASVEGRFTISRDNAKSTLYLQLNSLKTEDTAMYYCTKGYGDGTPAPGQGTQVTVSSASHHHHHH

SEQ ID NO: 169 - protein, 258 aa, Artificial Sequence
  Description of Artificial Sequence: Synthetic polypeptide
QVQLQESGGGSVQAGGSLRLSCGASGYTYSSYCMGWFRQVPGKEREGVAVIDSDGSTSYADSVKGRFTISKDNGKNTLYLQMNSLKPEDTAMYYCAADLGHYRPPCGVLYLGMDYWGKGTQVTVSSGGGSQVQLQESGGGLVQPGGSLRLSCAASGFTFSSAHMSWVRQAPGKGREWIASIYSGGGTFYADSVKGRFTISRDNAKNTLYLQLNSLKAEDTAMYYCATNRLHYYSDDDSLRGQGTQVTVSSASHHHHHH

SEQ ID NO: 170 - protein, 259 aa, Artificial Sequence; identical to SEQ ID NO: 55
  Description of Artificial Sequence: Synthetic polypeptide

SEQ ID NO: 171 - protein, 257 aa, Artificial Sequence; identical to SEQ ID NO: 56
  Description of Artificial Sequence: Synthetic polypeptide

SEQ ID NO: 172 - protein, 263 aa, Artificial Sequence
  Description of Artificial Sequence: Synthetic polypeptide
QVQLQESGGGSVQAGGSLRLSCGASGYTYSSYCMGWFRQVPGKEREGVAVIDSDGSTSYADSVKGRFTISKDNGKNTLYLQMNSLKPEDTAMYYCAADLGHYRPPCGVLYLGMDYWGKGTQVTVSSGGGSQVQLQESGGGSVQAGGSLRLSCTASGFTFDDSDMGWYRQAPGNECELVSTISSDGSTYYADSVKGRFTISQDNAKNTVYLQMNSLKPEDTAVYYCAAEPRGYYSNYGGRRECNYWGQGTQVTVSSASHHHHHH

SEQ ID NO: 173 - protein, 265 aa, Artificial Sequence; identical to SEQ ID NO: 57
  Description of Artificial Sequence: Synthetic polypeptide

SEQ ID NO: 174 - protein, 256 aa, Artificial Sequence
  Description of Artificial Sequence: Synthetic polypeptide
QVQLQESGGGSVQAGGSLRLSCAASGYSNCSYDMTWYRQAPGKEREFVSAIHSDGSTRYADSVKGRFFISQDNAKNTVYLQMNSLKPEDTAMYYCKTDPLHCRAHGGSWYSVRANYWGQGTQVTVSSGGGSQVQLQESGGGLVQPGGSLRLSCTASGFSFSSYPMTWARQAPGKGLEWVSTIASDGGSTAYAASVEGRFTISRDNAKSTLYLQLNSLKTEDTAMYYCTKGYGDGTPAPGQGTQVTVSSASHHHHHH

SEQ ID NO: 175 - protein, 259 aa, Artificial Sequence
  Description of Artificial Sequence: Synthetic polypeptide
QVQLQESGGGSVQAGGSLRLSCAASGYSNCSYDMTWYRQAPGKEREFVSAIHSDGSTRYADSVKGRFFISQDNAKNTVYLQMNSLKPEDTAMYYCKTDPLHCRAHGGSWYSVRANYWGQGTQVTVSSGGGSQVQLQESGGGLVQPGGSLRLSCAASGFTFSSAHMSWVRQAPGKGREWIASIYSGGGTFYADSVKGRFTISRDNAKNTLYLQLNSLKAEDTAMYYCATNRLHYYSDDDSLRGQGTQVTVSSASHHHHHH

SEQ ID NO: 176 - protein, 260 aa, Artificial Sequence; identical to SEQ ID NO: 58
  Description of Artificial Sequence: Synthetic polypeptide

SEQ ID NO: 177 - protein, 258 aa, Artificial Sequence
  Description of Artificial Sequence: Synthetic polypeptide
QVQLQESGGGSVQAGGSLRLSCAASGYSNCSYDMTWYRQAPGKEREFVSAIHSDGSTRYADSVKGRFFISQDNAKNTVYLQMNSLKPEDTAMYYCKTDPLHCRAHGGSWYSVRANYWGQGTQVTVSSGGGSQVQLQESGGGSVQAGGSLRLSCVASGYTSCMGWFRQAPGKEREAVATIYTRGRSIYYADSVKGRFTISQDNAKNTLYLQMNSLKPEDIAMYSCAAGGYSWSAGCEFNYWGQGTQVTVSSASHHHHHH

SEQ ID NO: 178 - protein, 264 aa, Artificial Sequence
  Description of Artificial Sequence: Synthetic polypeptide
QVQLQESGGGSVQAGGSLRLSCAASGYSNCSYDMTWYRQAPGKEREFVSAIHSDGSTRYADSVKGRFFISQDNAKNTVYLQMNSLKPEDTAMYYCKTDPLHCRAHGGSWYSVRANYWGQGTQVTVSSGGGSQVQLQESGGGSVQAGGSLRLSCTASGFTFDDSDMGWYRQAPGNECELVSTISSDGSTYYADSVKGRFTISQDNAKNTVYLQMNSLKPEDTAVYYCAAEPRGYYSNYGGRRECNYWGQGTQVTVSSASHHHHHH

SEQ ID NO: 179 - protein, 266 aa, Artificial Sequence; identical to SEQ ID NO: 59
  Description of Artificial Sequence: Synthetic polypeptide

SEQ ID NO: 180 - DNA, 762 bp, Artificial Sequence
  Description of Artificial Sequence: Synthetic polynucleotide
caagtgcagctgcaagagagcggaggaggactggtccagcccggcggctctctgaggctgagctgcactgcttccggcttcagcttcagcagctaccctatgacatgggctaggcaagcccccggcaaaggactggaatgggtgagcactattgccagcgatggaggcagcacagcctacgctgccagcgtggagggaaggttcacaatctctagggacaatgccaagagcacactgtatctgcagctgaactctctgaagacagaggacactgccatgtactactgcactaagggctacggcgatggcacaccagctcccggccaaggcacacaagtgactgtctcgagcggcggaggatcccaagtgcagctgcaagagagcggaggaggaagcgtgcaagccggaggctctctgagactgagctgtgccgcctctaggtatctgtacagcatcgactacatggcttggttcagacagagccccggcaaggagagggagccagtggctgtcatctacactgcctccggcgccacattctatccagatagcgtgaagggaaggttcactatcagccaagataacgccaagatgacagtgtatctgcagatgaactctctgaagagcgaggacactgccatgtactactgtgccgccgtgaggaagacagatagctacctcttcgacgcccagagcttcacatactggggccaaggcacacaagtgacagtctcgtctgctagccaccatcaccatcaccac

SEQ ID NO: 181 - DNA, 774 bp, Artificial Sequence; identical to SEQ ID NO: 83
  Description of Artificial Sequence: Synthetic polynucleotide

SEQ ID NO: 182 - DNA, 780 bp, Artificial Sequence
  Description of Artificial Sequence: Synthetic polynucleotide
caagtgcagctgcaagagagcggaggaggactggtccagcccggcggctctctgaggctgagctgcactgcttccggcttcagcttcagcagctaccctatgacatgggctaggcaagcccccggcaaaggactggaatgggtgagcactattgccagcgatggaggcagcacagcctacgctgccagcgtggagggaaggttcacaatctctagggacaatgccaagagcacactgtatctgcagctgaactctctgaagacagaggacactgccatgtactactgcactaagggctacggcgatggcacaccagctcccggccaaggcacacaagtgactgtctcgagcggcggaggatcccaagtgcagctgcaagagtccggaggaggcagcgtccaagccggaggctctctgaggctgagctgtgctgccagcggctacacttacagcatgtactgcatgggctggttcagacaagcccccggcaaggaaagagagggcgtggcccagatcaatagcgatggcagcacaagctacgccgacagcgtgaagggaaggttcactatctccaaggacaacgccaagaacactctgtatctgcagatgaactctctgaagccagaggacactgccatgtactactgcgctgccgattctagggtgtacggcggcagctggtatgagaggctctgcggcccttacacatacgagtacaactactggggccaaggcacacaagtgactgtctcgtctgctagccaccatcaccatcaccac

SEQ ID NO: 183 - DNA, 789 bp, Artificial Sequence
  Description of Artificial Sequence: Synthetic polynucleotide
caagtgcagctgcaagagagcggaggaggactggtccagcccggcggctctctgaggctgagctgcactgcttccggcttcagcttcagcagctaccctatgacatgggctaggcaagcccccggcaaaggactggaatgggtgagcactattgccagcgatggaggcagcacagcctacgctgccagcgtggagggaaggttcacaatctctagggacaatgccaagagcacactgtatctgcagctgaactctctgaagacagaggacactgccatgtactactgcactaagggctacggcgatggcacaccagctcccggccaaggcacacaagtgactgtctcgagcggcggaggatcccaagtgcagctgcaagagagcggcggaggaagcgtgcaagccggaggatctctgagactgagctgcgctgtgagcggctacgcctactccacatactgcatgggctggtttaggcaagcccccggcaaagagagagagggcgtggctgctatcgatagcggcggcagcacaagctacgccgatagcgtgaagggaaggttcacaatcagcaaggacaacgccaagaacacactgtatctgaggatgaactctctgaagccagaggacacagccatgtactactgtgctgctgtgcctcctcctccagatggcggcagctgtctgtttctgggaccagagatcaaggtcagcaaggccgattttaggtactggggccaaggcacacaagtgacagtctcgtctgctagccaccatcaccatcaccac

SEQ ID NO: 184 - DNA, 768 bp, Artificial Sequence; identical to SEQ ID NO: 84
  Description of Artificial Sequence: Synthetic polynucleotide

SEQ ID NO: 185 - DNA, 765 bp, Artificial Sequence
  Description of Artificial Sequence: Synthetic polynucleotide
caagtgcagctgcaagagagcggaggaggactggtccagcccggcggctctctgaggctgagctgcactgcttccggcttcagcttcagcagctaccctatgacatgggctaggcaagcccccggcaaaggactggaatgggtgagcactattgccagcgatggaggcagcacagcctacgctgccagcgtggagggaaggttcacaatctctagggacaatgccaagagcacactgtatctgcagctgaactctctgaagacagaggacactgccatgtactactgcactaagggctacggcgatggcacaccagctcccggccaaggcacacaagtgactgtctcgagcggcggaggatcccaagtgcagctgcaagagagcggaggaggaagcgtccaagccggaggctctctgaggctgagctgtggagccagcggctacacttacagcagctactgtatgggctggtttaggcaagtgcccggcaaggagagagagggcgtggccgtgatcgattccgatggcagcacaagctacgctgacagcgtgaagggaaggttcacaatcagcaaggacaacggcaagaacacactctatctgcagatgaacagcctcaagccagaggacacagccatgtactactgcgccgctgatctgggccactataggcctccttgtggcgtgctgtatctgggcatggattactggggcaagggcacacaagtgacagtctcgtctgctagccaccatcaccatcaccac

SEQ ID NO: 186 - DNA, 768 bp, Artificial Sequence
  Description of Artificial Sequence: Synthetic polynucleotide
caagtgcagctgcaagagagcggaggaggactggtccagcccggcggctctctgaggctgagctgcactgcttccggcttcagcttcagcagctaccctatgacatgggctaggcaagcccccggcaaaggactggaatgggtgagcactattgccagcgatggaggcagcacagcctacgctgccagcgtggagggaaggttcacaatctctagggacaatgccaagagcacactgtatctgcagctgaactctctgaagacagaggacactgccatgtactactgcactaagggctacggcgatggcacaccagctcccggccaaggcacacaagtgactgtctcgagcggcggaggatcccaagtgcagctgcaagagagcggaggaggaagcgtccaagccggaggctctctgagactgagctgtgccgccagcggctactccaactgcagctacgacatgacttggtataggcaagcccccggcaaggagagggagttcgtgtccgccatccacagcgacggcagcactagatacgccgacagcgtgaagggaaggttcttcatcagccaagataacgccaagaacacagtgtatctgcagatgaactccctcaagccagaggacactgccatgtactactgcaagacagacccactgcactgcagagcccatggcggcagctggtatagcgtgagggccaactactggggccaaggcacacaagtgacagtctcgtctgctagccaccatcaccatcaccac

SEQ ID NO: 187 - DNA, 771 bp, Artificial Sequence
  Description of Artificial Sequence: Synthetic polynucleotide
caagtgcagctgcaagagagcggaggaggactggtgcagcccggcggctctctgaggctgagctgtgctgccagcggcttcactttcagcagcgctcacatgagctgggtgaggcaagcccccggcaaaggaagggagtggatcgcctccatctacagcggcggcggaacattctacgccgacagcgtgaagggaaggttcacaatctctagggacaacgccaagaacacactgtatctgcagctgaactctctgaaggccgaggacactgccatgtactactgcgccactaataggctgcactactacagcgacgatgattctctgaggggccaaggcacacaagtgacagtctcgagcggcggaggatcccaagtgcagctgcaagagagcggaggaggaagcgtgcaagccggaggctctctgagactgagctgtgccgcctctaggtatctgtacagcatcgactacatggcttggttcagacagagccccggcaaggagagggagccagtggctgtcatctacactgcctccggcgccacattctatccagatagcgtgaagggaaggttcactatcagccaagataacgccaagatgacagtgtatctgcagatgaactctctgaagagcgaggacactgccatgtactactgtgccgccgtgaggaagacagatagctacctcttcgacgcccagagcttcacatactggggccaaggcacacaagtgacagtctcgtctgctagccaccatcaccatcaccac

SEQ ID NO: 188 - DNA, 783 bp, Artificial Sequence
  Description of Artificial Sequence: Synthetic polynucleotide
caagtgcagctgcaagagagcggaggaggactggtgcagcccggcggctctctgaggctgagctgtgctgccagcggcttcactttcagcagcgctcacatgagctgggtgaggcaagcccccggcaaaggaagggagtggatcgcctccatctacagcggcggcggaacattctacgccgacagcgtgaagggaaggttcacaatctctagggacaacgccaagaacacactgtatctgcagctgaactctctgaaggccgaggacactgccatgtactactgcgccactaataggctgcactactacagcgacgatgattctctgaggggccaaggcacacaagtgacagtctcgagcggcggaggatcccaagtgcagctgcaagagagcggaggaggaagcgtgcaagccggaggctctctgaggctgagctgtgccgcctctaggttcacatacagcagctactgcatgggctggttcagacaagcccccggcaaagagagagaaggcgtggccagcatcgatagcgatggctccactagctacactgacagcgtgaagggaaggttcactatcagcaaggacaacgccaagaacactctgtatctgcagatgaactctctgaagccagaggacacagccatgtactactgtgccctcgatctgatgagcacagtggtgcccggcttctgtggctttctgctgagcgctggcatggattactggggcaagggcactcaagtgactgtctcgtctgctagccaccatcaccatcaccac

SEQ ID NO: 189 - DNA, 789 bp, Artificial Sequence
  Description of Artificial Sequence: Synthetic polynucleotide
caagtgcagctgcaagagagcggaggaggactggtgcagcccggcggctctctgaggctgagctgtgctgccagcggcttcactttcagcagcgctcacatgagctgggtgaggcaagcccccggcaaaggaagggagtggatcgcctccatctacagcggcggcggaacattctacgccgacagcgtgaagggaaggttcacaatctctagggacaacgccaagaacacactgtatctgcagctgaactctctgaaggccgaggacactgccatgtactactgcgccactaataggctgcactactacagcgacgatgattctctgaggggccaaggcacacaagtgacagtctcgagcggcggaggatcccaagtgcagctgcaagagtccggaggaggcagcgtccaagccggaggctctctgaggctgagctgtgctgccagcggctacacttacagcatgtactgcatgggctggttcagacaagcccccggcaaggaaagagagggcgtggcccagatcaatagcgatggcagcacaagctacgccgacagcgtgaagggaaggttcactatctccaaggacaacgccaagaacactctgtatctgcagatgaactctctgaagccagaggacactgccatgtactactgcgctgccgattctagggtgtacggcggcagctggtatgagaggctctgcggcccttacacatacgagtacaactactggggccaaggcacacaagtgactgtctcgtctgctagccaccatcaccatcaccac

SEQ ID NO: 190 - DNA, 798 bp, Artificial Sequence
  Description of Artificial Sequence: Synthetic polynucleotide
caagtgcagctgcaagagagcggaggaggactggtgcagcccggcggctctctgaggctgagctgtgctgccagcggcttcactttcagcagcgctcacatgagctgggtgaggcaagcccccggcaaaggaagggagtggatcgcctccatctacagcggcggcggaacattctacgccgacagcgtgaagggaaggttcacaatctctagggacaacgccaagaacacactgtatctgcagctgaactctctgaaggccgaggacactgccatgtactactgcgccactaataggctgcactactacagcgacgatgattctctgaggggccaaggcacacaagtgacagtctcgagcggcggaggatcccaagtgcagctgcaagagagcggcggaggaagcgtgcaagccggaggatctctgagactgagctgcgctgtgagcggctacgcctactccacatactgcatgggctggtttaggcaagcccccggcaaagagagagagggcgtggctgctatcgatagcggcggcagcacaagctacgccgatagcgtgaagggaaggttcacaatcagcaaggacaacgccaagaacacactgtatctgaggatgaactctctgaagccagaggacacagccatgtactactgtgctgctgtgcctcctcctccagatggcggcagctgtctgtttctgggaccagagatcaaggtcagcaaggccgattttaggtactggggccaaggcacacaagtgacagtctcgtctgctagccaccatcaccatcaccac

SEQ ID NO: 191 - DNA, 777 bp, Artificial Sequence
  Description of Artificial Sequence: Synthetic polynucleotide
caagtgcagctgcaagagagcggaggaggactggtgcagcccggcggctctctgaggctgagctgtgctgccagcggcttcactttcagcagcgctcacatgagctgggtgaggcaagcccccggcaaaggaagggagtggatcgcctccatctacagcggcggcggaacattctacgccgacagcgtgaagggaaggttcacaatctctagggacaacgccaagaacacactgtatctgcagctgaactctctgaaggccgaggacactgccatgtactactgcgccactaataggctgcactactacagcgacgatgattctctgaggggccaaggcacacaagtgacagtctcgagcggcggaggatcccaagtgcagctgcaagagagcggaggaggaagcgtgcaagccggaggctctctgaggctgagctgtacagtgtccggctacacttacagctccaattgcatgggctggtttaggcaagcccccggcaaggaaagagagggcgtggccactatctacactggcggcggcaacacatactacgccgatagcgtgaagggaaggttcactatcagccaagataacgccaagaacacagtgtatctgcagatgaacaatctgaagccagaggacactgccatgtactactgtgctgctgagccactgtctagggtgtacggcggcagctgcccaactcctacattcgactactggggccaaggcacacaagtgactgtctcgtctgctagccaccatcaccatcaccac

SEQ ID NO: 192 - DNA, 774 bp, Artificial Sequence
  Description of Artificial Sequence: Synthetic polynucleotide
caagtgcagctgcaagagagcggaggaggactggtgcagcccggcggctctctgaggctgagctgtgctgccagcggcttcactttcagcagcgctcacatgagctgggtgaggcaagcccccggcaaaggaagggagtggatcgcctccatctacagcggcggcggaacattctacgccgacagcgtgaagggaaggttcacaatctctagggacaacgccaagaacacactgtatctgcagctgaactctctgaaggccgaggacactgccatgtactactgcgccactaataggctgcactactacagcgacgatgattctctgaggggccaaggcacacaagtgacagtctcgagcggcggaggatcccaagtgcagctgcaagagagcggaggaggaagcgtccaagccggaggctctctgaggctgagctgtggagccagcggctacacttacagcagctactgtatgggctggtttaggcaagtgcccggcaaggagagagagggcgtggccgtgatcgattccgatggcagcacaagctacgctgacagcgtgaagggaaggttcacaatcagcaaggacaacggcaagaacacactctatctgcagatgaacagcctcaagccagaggacacagccatgtactactgcgccgctgatctgggccactataggcctccttgtggcgtgctgtatctgggcatggattactggggcaagggcacacaagtgacagtctcgtctgctagccaccatcaccatcaccac

SEQ ID NO: 193 - DNA, 777 bp, Artificial Sequence
  Description of Artificial Sequence: Synthetic polynucleotide
caagtgcagctgcaagagagcggaggaggactggtgcagcccggcggctctctgaggctgagctgtgctgccagcggcttcactttcagcagcgctcacatgagctgggtgaggcaagcccccggcaaaggaagggagtggatcgcctccatctacagcggcggcggaacattctacgccgacagcgtgaagggaaggttcacaatctctagggacaacgccaagaacacactgtatctgcagctgaactctctgaaggccgaggacactgccatgtactactgcgccactaataggctgcactactacagcgacgatgattctctgaggggccaaggcacacaagtgacagtctcgagcggcggaggatcccaagtgcagctgcaagagagcggaggaggaagcgtccaagccggaggctctctgagactgagctgtgccgccagcggctactccaactgcagctacgacatgacttggtataggcaagcccccggcaaggagagggagttcgtgtccgccatccacagcgacggcagcactagatacgccgacagcgtgaagggaaggttcttcatcagccaagataacgccaagaacacagtgtatctgcagatgaactccctcaagccagaggacactgccatgtactactgcaagacagacccactgcactgcagagcccatggcggcagctggtatagcgtgagggccaactactggggccaaggcacacaagtgacagtctcgtctgctagccaccatcaccatcaccac

SEQ ID NO: 194 - DNA, 774 bp, Artificial Sequence
  Description of Artificial Sequence: Synthetic polynucleotide
caagtgcagctgcaagagagcggaggaggaagcgtgcaagccggcggatctctgagactcagctgtactgcctccggcttcacattcgacgatagggagatgaactggtataggcaagcccccggcaatgagtgcgagctggtgagcacaatctccagcgatggcagcacttactacgccgatagcgtgaagggaaggttcactatctcccaagataacgccaagaacacagtctatctgcagatggactccgtcaagccagaggatactgccgtgtactactgcgccgccgacttcatgatcgccatccaagcccccggcgctggctgttggggacaaggcactcaagtgacagtctcgagcggcggaggatcccaagtgcagctgcaagagagcggaggaggaagcgtgcaagccggaggctctctgagactgagctgtgccgcctctaggtatctgtacagcatcgactacatggcttggttcagacagagccccggcaaggagagggagccagtggctgtcatctacactgcctccggcgccacattctatccagatagcgtgaagggaaggttcactatcagccaagataacgccaagatgacagtgtatctgcagatgaactctctgaagagcgaggacactgccatgtactactgtgccgccgtgaggaagacagatagctacctcttcgacgcccagagcttcacatactggggccaaggcacacaagtgacagtctcgtctgctagccaccatcaccatcaccac

SEQ ID NO: 195 - DNA, 786 bp, Artificial Sequence
  Description of Artificial Sequence: Synthetic polynucleotide
caagtgcagctgcaagagagcggaggaggaagcgtgcaagccggcggatctctgagactcagctgtactgcctccggcttcacattcgacgatagggagatgaactggtataggcaagcccccggcaatgagtgcgagctggtgagcacaatctccagcgatggcagcacttactacgccgatagcgtgaagggaaggttcactatctcccaagataacgccaagaacacagtctatctgcagatggactccgtcaagccagaggatactgccgtgtactactgcgccgccgacttcatgatcgccatccaagcccccggcgctggctgttggggacaaggcactcaagtgacagtctcgagcggcggaggatcccaagtgcagctgcaagagagcggaggaggaagcgtgcaagccggaggctctctgaggctgagctgtgccgcctctaggttcacatacagcagctactgcatgggctggttcagacaagcccccggcaaagagagagaaggcgtggccagcatcgatagcgatggctccactagctacactgacagcgtgaagggaaggttcactatcagcaaggacaacgccaagaacactctgtatctgcagatgaactctctgaagccagaggacacagccatgtactactgtgccctcgatctgatgagcacagtggtgcccggcttctgtggctttctgctgagcgctggcatggattactggggcaagggcactcaagtgactgtctcgtctgctagccaccatcaccatcaccac

SEQ ID NO: 196 - DNA, 792 bp, Artificial Sequence
  Description of Artificial Sequence: Synthetic polynucleotide
caagtgcagctgcaagagagcggaggaggaagcgtgcaagccggcggatctctgagactcagctgtactgcctccggcttcacattcgacgatagggagatgaactggtataggcaagcccccggcaatgagtgcgagctggtgagcacaatctccagcgatggcagcacttactacgccgatagcgtgaagggaaggttcactatctcccaagataacgccaagaacacagtctatctgcagatggactccgtcaagccagaggatactgccgtgtactactgcgccgccgacttcatgatcgccatccaagcccccggcgctggctgttggggacaaggcactcaagtgacagtctcgagcggcggaggatcccaagtgcagctgcaagagtccggaggaggcagcgtccaagccggaggctctctgaggctgagctgtgctgccagcggctacacttacagcatgtactgcatgggctggttcagacaagcccccggcaaggaaagagagggcgtggcccagatcaatagcgatggcagcacaagctacgccgacagcgtgaagggaaggttcactatctccaaggacaacgccaagaacactctgtatctgcagatgaactctctgaagccagaggacactgccatgtactactgcgctgccgattctagggtgtacggcggcagctggtatgagaggctctgcggcccttacacatacgagtacaactactggggccaaggcacacaagtgactgtctcgtctgctagccaccatcaccatcaccac

SEQ ID NO: 197 - DNA, 801 bp, Artificial Sequence
  Description of Artificial Sequence: Synthetic polynucleotide
caagtgcagctgcaagagagcggaggaggaagcgtgcaagccggcggatctctgagactcagctgtactgcctccggcttcacattcgacgatagggagatgaactggtataggcaagcccccggcaatgagtgcgagctggtgagcacaatctccagcgatggcagcacttactacgccgatagcgtgaagggaaggttcactatctcccaagataacgccaagaacacagtctatctgcagatggactccgtcaagccagaggatactgccgtgtactactgcgccgccgacttcatgatcgccatccaagcccccggcgctggctgttggggacaaggcactcaagtgacagtctcgagcggcggaggatcccaagtgcagctgcaagagagcggcggaggaagcgtgcaagccggaggatctctgagactgagctgcgctgtgagcggctacgcctactccacatactgcatgggctggtttaggcaagcccccggcaaagagagagagggcgtggctgctatcgatagcggcggcagcacaagctacgccgatagcgtgaagggaaggttcacaatcagcaaggacaacgccaagaacacactgtatctgaggatgaactctctgaagccagaggacacagccatgtactactgtgctgctgtgcctcctcctccagatggcggcagctgtctgtttctgggaccagagatcaaggtcagcaaggccgattttaggtactggggccaaggcacacaagtgacagtctcgtctgctagccaccatcaccatcaccac

SEQ ID NO: 198 - DNA, 780 bp, Artificial Sequence
  Description of Artificial Sequence: Synthetic polynucleotide
caagtgcagctgcaagagagcggaggaggaagcgtgcaagccggcggatctctgagactcagctgtactgcctccggcttcacattcgacgatagggagatgaactggtataggcaagcccccggcaatgagtgcgagctggtgagcacaatctccagcgatggcagcacttactacgccgatagcgtgaagggaaggttcactatctcccaagataacgccaagaacacagtctatctgcagatggactccgtcaagccagaggatactgccgtgtactactgcgccgccgacttcatgatcgccatccaagcccccggcgctggctgttggggacaaggcactcaagtgacagtctcgagcggcggaggatcccaagtgcagctgcaagagagcggaggaggaagcgtgcaagccggaggctctctgaggctgagctgtacagtgtccggctacacttacagctccaattgcatgggctggtttaggcaagcccccggcaaggaaagagagggcgtggccactatctacactggcggcggcaacacatactacgccgatagcgtgaagggaaggttcactatcagccaagataacgccaagaacacagtgtatctgcagatgaacaatctgaagccagaggacactgccatgtactactgtgctgctgagccactgtctagggtgtacggcggcagctgcccaactcctacattcgactactggggccaaggcacacaagtgactgtctcgtctgctagccaccatcaccatcaccac

SEQ ID NO: 199 - DNA, 777 bp, Artificial Sequence
  Description of Artificial Sequence: Synthetic polynucleotide
caagtgcagctgcaagagagcggaggaggaagcgtgcaagccggcggatctctgagactcagctgtactgcctccggcttcacattcgacgatagggagatgaactggtataggcaagcccccggcaatgagtgcgagctggtgagcacaatctccagcgatggcagcacttactacgccgatagcgtgaagggaaggttcactatctcccaagataacgccaagaacacagtctatctgcagatggactccgtcaagccagaggatactgccgtgtactactgcgccgccgacttcatgatcgccatccaagcccccggcgctggctgttggggacaaggcactcaagtgacagtctcgagcggcggaggatcccaagtgcagctgcaagagagcggaggaggaagcgtccaagccggaggctctctgaggctgagctgtggagccagcggctacacttacagcagctactgtatgggctggtttaggcaagtgcccggcaaggagagagagggcgtggccgtgatcgattccgatggcagcacaagctacgctgacagcgtgaagggaaggttcacaatcagcaaggacaacggcaagaacacactctatctgcagatgaacagcctcaagccagaggacacagccatgtactactgcgccgctgatctgggccactataggcctccttgtggcgtgctgtatctgggcatggattactggggcaagggcacacaagtgacagtctcgtctgctagccaccatcaccatcaccac

SEQ ID NO: 200 - DNA, 780 bp, Artificial Sequence
  Description of Artificial Sequence: Synthetic polynucleotide
caagtgcagctgcaagagagcggaggaggaagcgtgcaagccggcggatctctgagactcagctgtactgcctccggcttcacattcgacgatagggagatgaactggtataggcaagcccccggcaatgagtgcgagctggtgagcacaatctccagcgatggcagcacttactacgccgatagcgtgaagggaaggttcactatctcccaagataacgccaagaacacagtctatctgcagatggactccgtcaagccagaggatactgccgtgtactactgcgccgccgacttcatgatcgccatccaagcccccggcgctggctgttggggacaaggcactcaagtgacagtctcgagcggcggaggatcccaagtgcagctgcaagagagcggaggaggaagcgtccaagccggaggctctctgagactgagctgtgccgccagcggctactccaactgcagctacgacatgacttggtataggcaagcccccggcaaggagagggagttcgtgtccgccatccacagcgacggcagcactagatacgccgacagcgtgaagggaaggttcttcatcagccaagataacgccaagaacacagtgtatctgcagatgaactccctcaagccagaggacactgccatgtactactgcaagacagacccactgcactgcagagcccatggcggcagctggtatagcgtgagggccaactactggggccaaggcacacaagtgacagtctcgtctgctagccaccatcaccatcaccac

SEQ ID NO: 201 - DNA, 768 bp, Artificial Sequence
  Description of Artificial Sequence: Synthetic polynucleotide
caagtgcagctgcaagagagcggaggaggcagcgtgcaagccggaggctctctgagactgagctgtgtggctagtggctacacaagctgcatgggctggtttaggcaagcccccggcaaggagagagaggccgtggccacaatctacactaggggaaggagcatctactacgccgacagcgtgaaaggaaggttcacaatcagccaagataacgccaagaacactctgtatctgcagatgaacagcctcaagccagaggacatcgccatgtatagctgtgctgctggcggctatagctggagcgctggctgcgagttcaattactggggccaaggcacacaagtgactgtctcgagcggcggaggatcccaagtgcagctgcaagagagcggaggaggaagcgtgcaagccggaggctctctgagactgagctgtgccgcctctaggtatctgtacagcatcgactacatggcttggttcagacagagccccggcaaggagagggagccagtggctgtcatctacactgcctccggcgccacattctatccagatagcgtgaagggaaggttcactatcagccaagataacgccaagatgacagtgtatctgcagatgaactctctgaagagcgaggacactgccatgtactactgtgccgccgtgaggaagacagatagctacctcttcgacgcccagagcttcacatactggggccaaggcacacaagtgacagtctcgtctgctagccaccatcaccatcaccac

SEQ ID NO: 202 - DNA, 780 bp, Artificial Sequence
  Description of Artificial Sequence: Synthetic polynucleotide
caagtgcagctgcaagagagcggaggaggcagcgtgcaagccggaggctctctgagactgagctgtgtggctagtggctacacaagctgcatgggctggtttaggcaagcccccggcaaggagagagaggccgtggccacaatctacactaggggaaggagcatctactacgccgacagcgtgaaaggaaggttcacaatcagccaagataacgccaagaacactctgtatctgcagatgaacagcctcaagccagaggacatcgccatgtatagctgtgctgctggcggctatagctggagcgctggctgcgagttcaattactggggccaaggcacacaagtgactgtctcgagcggcggaggatcccaagtgcagctgcaagagagcggaggaggaagcgtgcaagccggaggctctctgaggctgagctgtgccgcctctaggttcacatacagcagctactgcatgggctggttcagacaagcccccggcaaagagagagaaggcgtggccagcatcgatagcgatggctccactagctacactgacagcgtgaagggaaggttcactatcagcaaggacaacgccaagaacactctgtatctgcagatgaactctctgaagccagaggacacagccatgtactactgtgccctcgatctgatgagcacagtggtgcccggcttctgtggctttctgctgagcgctggcatggattactggggcaagggcactcaagtgactgtctcgtctgctagccaccatcaccatcaccac

SEQ ID NO: 203 - DNA, 786 bp, Artificial Sequence
  Description of Artificial Sequence: Synthetic polynucleotide
caagtgcagctgcaagagagcggaggaggcagcgtgcaagccggaggctctctgagactgagctgtgtggctagtggctacacaagctgcatgggctggtttaggcaagcccccggcaaggagagagaggccgtggccacaatctacactaggggaaggagcatctactacgccgacagcgtgaaaggaaggttcacaatcagccaagataacgccaagaacactctgtatctgcagatgaacagcctcaagccagaggacatcgccatgtatagctgtgctgctggcggctatagctggagcgctggctgcgagttcaattactggggccaaggcacacaagtgactgtctcgagcggcggaggatcccaagtgcagctgcaagagtccggaggaggcagcgtccaagccggaggctctctgaggctgagctgtgctgccagcggctacacttacagcatgtactgcatgggctggttcagacaagcccccggcaaggaaagagagggcgtggcccagatcaatagcgatggcagcacaagctacgccgacagcgtgaagggaaggttcactatctccaaggacaacgccaagaacactctgtatctgcagatgaactctctgaagccagaggacactgccatgtactactgcgctgccgattctagggtgtacggcggcagctggtatgagaggctctgcggcccttacacatacgagtacaactactggggccaaggcacacaagtgactgtctcgtctgctagccaccatcaccatcaccac

SEQ ID NO: 204 - DNA, 795 bp, Artificial Sequence
  Description of Artificial Sequence: Synthetic polynucleotide
caagtgcagctgcaagagagcggaggaggcagcgtgcaagccggaggctctctgagactgagctgtgtggctagtggctacacaagctgcatgggctggtttaggcaagcccccggcaaggagagagaggccgtggccacaatctacactaggggaaggagcatctactacgccgacagcgtgaaaggaaggttcacaatcagccaagataacgccaagaacactctgtatctgcagatgaacagcctcaagccagaggacatcgccatgtatagctgtgctgctggcggctatagctggagcgctggctgcgagttcaattactggggccaaggcacacaagtgactgtctcgagcggcggaggatcccaagtgcagctgcaagagagcggcggaggaagcgtgcaagccggaggatctctgagactgagctgcgctgtgagcggctacgcctactccacatactgcatgggctggtttaggcaagcccccggcaaagagagagagggcgtggctgctatcgatagcggcggcagcacaagctacgccgatagcgtgaagggaaggttcacaatcagcaaggacaacgccaagaacacactgtatctgaggatgaactctctgaagccagaggacacagccatgtactactgtgctgctgtgcctcctcctccagatggcggcagctgtctgtttctgggaccagagatcaaggtcagcaaggccgattttaggtactggggccaaggcacacaagtgacagtctcgtctgctagccaccatcaccatcaccac

SEQ ID NO: 205 - DNA, 774 bp, Artificial Sequence
  Description of Artificial Sequence: Synthetic polynucleotide
caagtgcagctgcaagagagcggaggaggcagcgtgcaagccggaggctctctgagactgagctgtgtggctagtggctacacaagctgcatgggctggtttaggcaagcccccggcaaggagagagaggccgtggccacaatctacactaggggaaggagcatctactacgccgacagcgtgaaaggaaggttcacaatcagccaagataacgccaagaacactctgtatctgcagatgaacagcctcaagccagaggacatcgccatgtatagctgtgctgctggcggctatagctggagcgctggctgcgagttcaattactggggccaaggcacacaagtgactgtctcgagcggcggaggatcccaagtgcagctgcaagagagcggaggaggaagcgtgcaagccggaggctctctgaggctgagctgtacagtgtccggctacacttacagctccaattgcatgggctggtttaggcaagcccccggcaaggaaagagagggcgtggccactatctacactggcggcggcaacacatactacgccgatagcgtgaagggaaggttcactatcagccaagataacgccaagaacacagtgtatctgcagatgaacaatctgaagccagaggacactgccatgtactactgtgctgctgagccactgtctagggtgtacggcggcagctgcccaactcctacattcgactactggggccaaggcacacaagtgactgtctcgtctgctagccaccatcaccatcaccac

SEQ ID NO: 206 - DNA, 771 bp, Artificial Sequence
  Description of Artificial Sequence: Synthetic polynucleotide
caagtgcagctgcaagagagcggaggaggcagcgtgcaagccggaggctctctgagactgagctgtgtggctagtggctacacaagctgcatgggctggtttaggcaagcccccggcaaggagagagaggccgtggccacaatctacactaggggaaggagcatctactacgccgacagcgtgaaaggaaggttcacaatcagccaagataacgccaagaacactctgtatctgcagatgaacagcctcaagccagaggacatcgccatgtatagctgtgctgctggcggctatagctggagcgctggctgcgagttcaattactggggccaaggcacacaagtgactgtctcgagcggcggaggatcccaagtgcagctgcaagagagcggaggaggaagcgtccaagccggaggctctctgaggctgagctgtggagccagcggctacacttacagcagctactgtatgggctggtttaggcaagtgcccggcaaggagagagagggcgtggccgtgatcgattccgatggcagcacaagctacgctgacagcgtgaagggaaggttcacaatcagcaaggacaacggcaagaacacactctatctgcagatgaacagcctcaagccagaggacacagccatgtactactgcgccgctgatctgggccactataggcctccttgtggcgtgctgtatctgggcatggattactggggcaagggcacacaagtgacagtctcgtctgctagccaccatcaccatcaccac

SEQ ID NO: 207 - DNA, 774 bp, Artificial Sequence
  Description of Artificial Sequence: Synthetic polynucleotide
caagtgcagctgcaagagagcggaggaggcagcgtgcaagccggaggctctctgagactgagctgtgtggctagtggctacacaagctgcatgggctggtttaggcaagcccccggcaaggagagagaggccgtggccacaatctacactaggggaaggagcatctactacgccgacagcgtgaaaggaaggttcacaatcagccaagataacgccaagaacactctgtatctgcagatgaacagcctcaagccagaggacatcgccatgtatagctgtgctgctggcggctatagctggagcgctggctgcgagttcaattactggggccaaggcacacaagtgactgtctcgagcggcggaggatcccaagtgcagctgcaagagagcggaggaggaagcgtccaagccggaggctctctgagactgagctgtgccgccagcggctactccaactgcagctacgacatgacttggtataggcaagcccccggcaaggagagggagttcgtgtccgccatccacagcgacggcagcactagatacgccgacagcgtgaagggaaggttcttcatcagccaagataacgccaagaacacagtgtatctgcagatgaactccctcaagccagaggacactgccatgtactactgcaagacagacccactgcactgcagagcccatggcggcagctggtatagcgtgagggccaactactggggccaaggcacacaagtgacagtctcgtctgctagccaccatcaccatcaccac

SEQ ID NO: 208 - DNA, 786 bp, Artificial Sequence
  Description of Artificial Sequence: Synthetic polynucleotide
caagtgcagctgcaagagagcggaggcggaagcgtgcaagctggaggatctctgaggctgagctgcacagccagcggcttcactttcgatgacagcgacatgggctggtataggcaagcccccggcaatgagtgtgagctggtgagcacaatcagcagcgacggctccacttactacgccgacagcgtcaagggaaggttcacaatcagccaagataacgccaagaacactgtgtatctgcagatgaactctctgaagccagaggacacagccgtgtactactgtgctgccgagcctaggggctactatagcaactacggcggaaggagggagtgcaattactggggccaaggcacacaagtgacagtctcgagcggcggaggatcccaagtgcagctgcaagagagcggaggaggaagcgtgcaagccggaggctctctgagactgagctgtgccgcctctaggtatctgtacagcatcgactacatggcttggttcagacagagccccggcaaggagagggagccagtggctgtcatctacactgcctccggcgccacattctatccagatagcgtgaagggaaggttcactatcagccaagataacgccaagatgacagtgtatctgcagatgaactctctgaagagcgaggacactgccatgtactactgtgccgccgtgaggaagacagatagctacctcttcgacgcccagagcttcacatactggggccaaggcacacaagtgacagtctcgtctgctagccaccatcaccatcaccac

SEQ ID NO: 209 - DNA, 798 bp, Artificial Sequence
  Description of Artificial Sequence: Synthetic polynucleotide
caagtgcagctgcaagagagcggaggcggaagcgtgcaagctggaggatctctgaggctgagctgcacagccagcggcttcactttcgatgacagcgacatgggctggtataggcaagcccccggcaatgagtgtgagctggtgagcacaatcagcagcgacggctccacttactacgccgacagcgtcaagggaaggttcacaatcagccaagataacgccaagaacactgtgtatctgcagatgaactctctgaagccagaggacacagccgtgtactactgtgctgccgagcctaggggctactatagcaactacggcggaaggagggagtgcaattactggggccaaggcacacaagtgacagtctcgagcggcggaggatcccaagtgcagctgcaagagagcggaggaggaagcgtgcaagccggaggctctctgaggctgagctgtgccgcctctaggttcacatacagcagctactgcatgggctggttcagacaagcccccggcaaagagagagaaggcgtggccagcatcgatagcgatggctccactagctacactgacagcgtgaagggaaggttcactatcagcaaggacaacgccaagaacactctgtatctgcagatgaactctctgaagccagaggacacagccatgtactactgtgccctcgatctgatgagcacagtggtgcccggcttctgtggctttctgctgagcgctggcatggattactggggcaagggcactcaagtgactgtctcgtctgctagccaccatcaccatcaccac

SEQ ID NO: 210 - DNA, 804 bp, Artificial Sequence
  Description of Artificial Sequence: Synthetic polynucleotide
caagtgcagctgcaagagagcggaggcggaagcgtgcaagctggaggatctctgaggctgagctgcacagccagcggcttcactttcgatgacagcgacatgggctggtataggcaagcccccggcaatgagtgtgagctggtgagcacaatcagcagcgacggctccacttactacgccgacagcgtcaagggaaggttcacaatcagccaagataacgccaagaacactgtgtatctgcagatgaactctctgaagccagaggacacagccgtgtactactgtgctgccgagcctaggggctactatagcaactacggcggaaggagggagtgcaattactggggccaaggcacacaagtgacagtctcgagcggcggaggatcccaagtgcagctgcaagagtccggaggaggcagcgtccaagccggaggctctctgaggctgagctgtgctgccagcggctacacttacagcatgtactgcatgggctggttcagacaagcccccggcaaggaaagagagggcgtggcccagatcaatagcgatggcagcacaagctacgccgacagcgtgaagggaaggttcactatctccaaggacaacgccaagaacactctgtatctgcagatgaactctctgaagccagaggacactgccatgtactactgcgctgccgattctagggtgtacggcggcagctggtatgagaggctctgcggcccttacacatacgagtacaactactggggccaaggcacacaagtgactgtctcgtctgctagccaccatcaccatcaccac

SEQ ID NO: 211 - DNA, 813 bp, Artificial Sequence
  Description of Artificial Sequence: Synthetic polynucleotide
caagtgcagctgcaagagagcggaggcggaagcgtgcaagctggaggatctctgaggctgagctgcacagccagcggcttcactttcgatgacagcgacatgggctggtataggcaagcccccggcaatgagtgtgagctggtgagcacaatcagcagcgacggctccacttactacgccgacagcgtcaagggaaggttcacaatcagccaagataacgccaagaacactgtgtatctgcagatgaactctctgaagccagaggacacagccgtgtactactgtgctgccgagcctaggggctactatagcaactacggcggaaggagggagtgcaattactggggccaaggcacacaagtgacagtctcgagcggcggaggatcccaagtgcagctgcaagagagcggcggaggaagcgtgcaagccggaggatctctgagactgagctgcgctgtgagcggctacgcctactccacatactgcatgggctggtttaggcaagcccccggcaaagagagagagggcgtggctgctatcgatagcggcggcagcacaagctacgccgatagcgtgaagggaaggttcacaatcagcaaggacaacgccaagaacacactgtatctgaggatgaactctctgaagccagaggacacagccatgtactactgtgctgctgtgcctcctcctccagatggcggcagctgtctgtttctgggaccagagatcaaggtcagcaaggccgattttaggtactggggccaaggcacacaagtgacagtctcgtctgctagccaccatcaccatcaccac

SEQ ID NO: 212 - DNA, 792 bp, Artificial Sequence
  Description of Artificial Sequence: Synthetic polynucleotide
caagtgcagctgcaagagagcggaggcggaagcgtgcaagctggaggatctctgaggctgagctgcacagccagcggcttcactttcgatgacagcgacatgggctggtataggcaagcccccggcaatgagtgtgagctggtgagcacaatcagcagcgacggctccacttactacgccgacagcgtcaagggaaggttcacaatcagccaagataacgccaagaacactgtgtatctgcagatgaactctctgaagccagaggacacagccgtgtactactgtgctgccgagcctaggggctactatagcaactacggcggaaggagggagtgcaattactggggccaaggcacacaagtgacagtctcgagcggcggaggatcccaagtgcagctgcaagagagcggaggaggaagcgtgcaagccggaggctctctgaggctgagctgtacagtgtccggctacacttacagctccaattgcatgggctggtttaggcaagcccccggcaaggaaagagagggcgtggccactatctacactggcggcggcaacacatactacgccgatagcgtgaagggaaggttcactatcagccaagataacgccaagaacacagtgtatctgcagatgaacaatctgaagccagaggacactgccatgtactactgtgctgctgagccactgtctagggtgtacggcggcagctgcccaactcctacattcgactactggggccaaggcacacaagtgactgtctcgtctgctagccaccatcaccatcaccac

SEQ ID NO: 213 - DNA, 789 bp, Artificial Sequence
  Description of Artificial Sequence: Synthetic polynucleotide
caagtgcagctgcaagagagcggaggcggaagcgtgcaagctggaggatctctgaggctgagctgcacagccagcggcttcactttcgatgacagcgacatgggctggtataggcaagcccccggcaatgagtgtgagctggtgagcacaatcagcagcgacggctccacttactacgccgacagcgtcaagggaaggttcacaatcagccaagataacgccaagaacactgtgtatctgcagatgaactctctgaagccagaggacacagccgtgtactactgtgctgccgagcctaggggctactatagcaactacggcggaaggagggagtgcaattactggggccaaggcacacaagtgacagtctcgagcggcggaggatcccaagtgcagctgcaagagagcggaggaggaagcgtccaagccggaggctctctgaggctgagctgtggagccagcggctacacttacagcagctactgtatgggctggtttaggcaagtgcccggcaaggagagagagggcgtggccgtgatcgattccgatggcagcacaagctacgctgacagcgtgaagggaaggttcacaatcagcaaggacaacggcaagaacacactctatctgcagatgaacagcctcaagccagaggacacagccatgtactactgcgccgctgatctgggccactataggcctccttgtggcgtgctgtatctgggcatggattactggggcaagggcacacaagtgacagtctcgtctgctagccaccatcaccatcaccac

SEQ ID NO: 214 - DNA, 792 bp, Artificial Sequence
  Description of Artificial Sequence: Synthetic polynucleotide
caagtgcagctgcaagagagcggaggcggaagcgtgcaagctggaggatctctgaggctgagctgcacagccagcggcttcactttcgatgacagcgacatgggctggtataggcaagcccccggcaatgagtgtgagctggtgagcacaatcagcagcgacggctccacttactacgccgacagcgtcaagggaaggttcacaatcagccaagataacgccaagaacactgtgtatctgcagatgaactctctgaagccagaggacacagccgtgtactactgtgctgccgagcctaggggctactatagcaactacggcggaaggagggagtgcaattactggggccaaggcacacaagtgacagtctcgagcggcggaggatcccaagtgcagctgcaagagagcggaggaggaagcgtccaagccggaggctctctgagactgagctgtgccgccagcggctactccaactgcagctacgacatgacttggtataggcaagcccccggcaaggagagggagttcgtgtccgccatccacagcgacggcagcactagatacgccgacagcgtgaagggaaggttcttcatcagccaagataacgccaagaacacagtgtatctgcagatgaactccctcaagccagaggacactgccatgtactactgcaagacagacccactgcactgcagagcccatggcggcagctggtatagcgtgagggccaactactggggccaaggcacacaagtgacagtctcgtctgctagccaccatcaccatcaccac

SEQ ID NO: 215 - DNA, 792 bp, Artificial Sequence
  Description of Artificial Sequence: Synthetic polynucleotide
caagtgcagctgcaagagagcggaggaggaagcgtgcaagccggaggctctctgaggctgagctgtgtggctagtggctacactttcagcagctactgcatgggctggttcagacaagcccccggcaaggaaagggaaggagtggccgctctgggcggaggaagcacatactacgctgacagcgtgaagggaaggttcacaatcagccaagataacgccaagaacacactgtatctgcagatgaactctctgaagccagaggacacagccatgtactactgtgccgctgcttgggtcgcttgtctggagttcggcggcagctggtacgatctggctaggtacaagcactggggccaaggcacacaagtgacagtctcgagcggcggaggatcccaagtgcagctgcaagagagcggaggaggaagcgtgcaagccggaggctctctgagactgagctgtgccgcctctaggtatctgtacagcatcgactacatggcttggttcagacagagccccggcaaggagagggagccagtggctgtcatctacactgcctccggcgccacattctatccagatagcgtgaagggaaggttcactatcagccaagataacgccaagatgacagtgtatctgcagatgaactctctgaagagcgaggacactgccatgtactactgtgccgccgtgaggaagacagatagctacctcttcgacgcccagagcttcacatactggggccaaggcacacaagtgacagtctcgtctgctagccaccatcaccatcaccac

SEQ ID NO: 216 - DNA, 804 bp, Artificial Sequence
  Description of Artificial Sequence: Synthetic polynucleotide
caagtgcagctgcaagagagcggaggaggaagcgtgcaagccggaggctctctgaggctgagctgtgtggctagtggctacactttcagcagctactgcatgggctggttcagacaagcccccggcaaggaaagggaaggagtggccgctctgggcggaggaagcacatactacgctgacagcgtgaagggaaggttcacaatcagccaagataacgccaagaacacactgtatctgcagatgaactctctgaagccagaggacacagccatgtactactgtgccgctgcttgggtcgcttgtctggagttcggcggcagctggtacgatctggctaggtacaagcactggggccaaggcacacaagtgacagtctcgagcggcggaggatcccaagtgcagctgcaagagagcggaggaggaagcgtgcaagccggaggctctctgaggctgagctgtgccgcctctaggttcacatacagcagctactgcatgggctggttcagacaagcccccggcaaagagagagaaggcgtggccagcatcgatagcgatggctccactagctacactgacagcgtgaagggaaggttcactatcagcaaggacaacgccaagaacactctgtatctgcagatgaactctctgaagccagaggacacagccatgtactactgtgccctcgatctgatgagcacagtggtgcccggcttctgtggctttctgctgagcgctggcatggattactggggcaagggcactcaagtgactgtctcgtctgctagccaccatcaccatcaccac

SEQ ID NO: 217 - DNA, 810 bp, Artificial Sequence
  Description of Artificial Sequence: Synthetic polynucleotide
caagtgcagctgcaagagagcggaggaggaagcgtgcaagccggaggctctctgaggctgagctgtgtggctagtggctacactttcagcagctactgcatgggctggttcagacaagcccccggcaaggaaagggaaggagtggccgctctgggcggaggaagcacatactacgctgacagcgtgaagggaaggttcacaatcagccaagataacgccaagaacacactgtatctgcagatgaactctctgaagccagaggacacagccatgtactactgtgccgctgcttgggtcgcttgtctggagttcggcggcagctggtacgatctggctaggtacaagcactggggccaaggcacacaagtgacagtctcgagcggcggaggatcccaagtgcagctgcaagagtccggaggaggcagcgtccaagccggaggctctctgaggctgagctgtgctgccagcggctacacttacagcatgtactgcatgggctggttcagacaagcccccggcaaggaaagagagggcgtggcccagatcaatagcgatggcagcacaagctacgccgacagcgtgaagggaaggttcactatctccaaggacaacgccaagaacactctgtatctgcagatgaactctctgaagccagaggacactgccatgtactactgcgctgccgattctagggtgtacggcggcagctggtatgagaggctctgcggcccttacacatacgagtacaactactggggccaaggcacacaagtgactgtctcgtctgctagccaccatcaccatcaccac

SEQ ID NO: 218 - DNA, 819 bp, Artificial Sequence
  Description of Artificial Sequence: Synthetic polynucleotide
caagtgcagctgcaagagagcggaggaggaagcgtgcaagccggaggctctctgaggctgagctgtgtggctagtggctacactttcagcagctactgcatgggctggttcagacaagcccccggcaaggaaagggaaggagtggccgctctgggcggaggaagcacatactacgctgacagcgtgaagggaaggttcacaatcagccaagataacgccaagaacacactgtatctgcagatgaactctctgaagccagaggacacagccatgtactactgtgccgctgcttgggtcgcttgtctggagttcggcggcagctggtacgatctggctaggtacaagcactggggccaaggcacacaagtgacagtctcgagcggcggaggatcccaagtgcagctgcaagagagcggcggaggaagcgtgcaagccggaggatctctgagactgagctgcgctgtgagcggctacgcctactccacatactgcatgggctggtttaggcaagcccccggcaaagagagagagggcgtggctgctatcgatagcggcggcagcacaagctacgccgatagcgtgaagggaaggttcacaatcagcaaggacaacgccaagaacacactgtatctgaggatgaactctctgaagccagaggacacagccatgtactactgtgctgctgtgcctcctcctccagatggcggcagctgtctgtttctgggaccagagatcaaggtcagcaaggccgattttaggtactggggccaaggcacacaagtgacagtctcgtctgctagccaccatcaccatcaccac

SEQ ID NO: 219 - DNA, 798 bp, Artificial Sequence
  Description of Artificial Sequence: Synthetic polynucleotide
caagtgcagctgcaagagagcggaggaggaagcgtgcaagccggaggctctctgaggctgagctgtgtggctagtggctacactttcagcagctactgcatgggctggttcagacaagcccccggcaaggaaagggaaggagtggccgctctgggcggaggaagcacatactacgctgacagcgtgaagggaaggttcacaatcagccaagataacgccaagaacacactgtatctgcagatgaactctctgaagccagaggacacagccatgtactactgtgccgctgcttgggtcgcttgtctggagttcggcggcagctggtacgatctggctaggtacaagcactggggccaaggcacacaagtgacagtctcgagcggcggaggatcccaagtgcagctgcaagagagcggaggaggaagcgtgcaagccggaggctctctgaggctgagctgtacagtgtccggctacacttacagctccaattgcatgggctggtttaggcaagcccccggcaaggaaagagagggcgtggccactatctacactggcggcggcaacacatactacgccgatagcgtgaagggaaggttcactatcagccaagataacgccaagaacacagtgtatctgcagatgaacaatctgaagccagaggacactgccatgtactactgtgctgctgagccactgtctagggtgtacggcggcagctgcccaactcctacattcgactactggggccaaggcacacaagtgactgtctcgtctgctagccaccatcaccatcaccac

SEQ ID NO: 220 - DNA, 795 bp, Artificial Sequence
  Description of Artificial Sequence: Synthetic polynucleotide
caagtgcagctgcaagagagcggaggaggaagcgtgcaagccggaggctctctgaggctgagctgtgtggctagtggctacactttcagcagctactgcatgggctggttcagacaagcccccggcaaggaaagggaaggagtggccgctctgggcggaggaagcacatactacgctgacagcgtgaagggaaggttcacaatcagccaagataacgccaagaacacactgtatctgcagatgaactctctgaagccagaggacacagccatgtactactgtgccgctgcttgggtcgcttgtctggagttcggcggcagctggtacgatctggctaggtacaagcactggggccaaggcacacaagtgacagtctcgagcggcggaggatcccaagtgcagctgcaagagagcggaggaggaagcgtccaagccggaggctctctgaggctgagctgtggagccagcggctacacttacagcagctactgtatgggctggtttaggcaagtgcccggcaaggagagagagggcgtggccgtgatcgattccgatggcagcacaagctacgctgacagcgtgaagggaaggttcacaatcagcaaggacaacggcaagaacacactctatctgcagatgaacagcctcaagccagaggacacagccatgtactactgcgccgctgatctgggccactataggcctccttgtggcgtgctgtatctgggcatggattactggggcaagggcacacaagtgacagtctcgtctgctagccaccatcaccatcaccac

SEQ ID NO: 221 - DNA, 798 bp, Artificial Sequence
  Description of Artificial Sequence: Synthetic polynucleotide
caagtgcagctgcaagagagcggaggaggaagcgtgcaagccggaggctctctgaggctgagctgtgtggctagtggctacactttcagcagctactgcatgggctggttcagacaagcccccggcaaggaaagggaaggagtggccgctctgggcggaggaagcacatactacgctgacagcgtgaagggaaggttcacaatcagccaagataacgccaagaacacactgtatctgcagatgaactctctgaagccagaggacacagccatgtactactgtgccgctgcttgggtcgcttgtctggagttcggcggcagctggtacgatctggctaggtacaagcactggggccaaggcacacaagtgacagtctcgagcggcggaggatcccaagtgcagctgcaagagagcggaggaggaagcgtccaagccggaggctctctgagactgagctgtgccgccagcggctactccaactgcagctacgacatgacttggtataggcaagcccccggcaaggagagggagttcgtgtccgccatccacagcgacggcagcactagatacgccgacagcgtgaagggaaggttcttcatcagccaagataacgccaagaacacagtgtatctgcagatgaactccctcaagccagaggacactgccatgtactactgcaagacagacccactgcactgcagagcccatggcggcagctggtatagcgtgagggccaactactggggccaaggcacacaagtgacagtctcgtctgctagccaccatcaccatcaccac

SEQ ID NO: 222 - DNA, 762 bp, Artificial Sequence
  Description of Artificial Sequence: Synthetic polynucleotide
caagtgcagctgcaagagagcggaggaggaagcgtgcaagccggaggctctctgagactgagctgtgccgcctctaggtatctgtacagcatcgactacatggcttggttcagacagagccccggcaaggagagggagccagtggctgtcatctacactgcctccggcgccacattctatccagatagcgtgaagggaaggttcactatcagccaagataacgccaagatgacagtgtatctgcagatgaactctctgaagagcgaggacactgccatgtactactgtgccgccgtgaggaagacagatagctacctcttcgacgcccagagcttcacatactggggccaaggcacacaagtgacagtctcgagcggcggaggatcccaagtgcagctgcaagagagcggaggaggactggtccagcccggcggctctctgaggctgagctgcactgcttccggcttcagcttcagcagctaccctatgacatgggctaggcaagcccccggcaaaggactggaatgggtgagcactattgccagcgatggaggcagcacagcctacgctgccagcgtggagggaaggttcacaatctctagggacaatgccaagagcacactgtatctgcagctgaactctctgaagacagaggacactgccatgtactactgcactaagggctacggcgatggcacaccagctcccggccaaggcacacaagtgactgtctcgtctgctagccaccatcaccatcaccac

SEQ ID NO: 223 - DNA, 771 bp, Artificial Sequence
  Description of Artificial Sequence: Synthetic polynucleotide
caagtgcagctgcaagagagcggaggaggaagcgtgcaagccggaggctctctgagactgagctgtgccgcctctaggtatctgtacagcatcgactacatggcttggttcagacagagccccggcaaggagagggagccagtggctgtcatctacactgcctccggcgccacattctatccagatagcgtgaagggaaggttcactatcagccaagataacgccaagatgacagtgtatctgcagatgaactctctgaagagcgaggacactgccatgtactactgtgccgccgtgaggaagacagatagctacctcttcgacgcccagagcttcacatactggggccaaggcacacaagtgacagtctcgagcggcggaggatcccaagtgcagctgcaagagagcggaggaggactggtgcagcccggcggctctctgaggctgagctgtgctgccagcggcttcactttcagcagcgctcacatgagctgggtgaggcaagcccccggcaaaggaagggagtggatcgcctccatctacagcggcggcggaacattctacgccgacagcgtgaagggaaggttcacaatctctagggacaacgccaagaacacactgtatctgcagctgaactctctgaaggccgaggacactgccatgtactactgcgccactaataggctgcactactacagcgacgatgattctctgaggggccaaggcacacaagtgacagtctcgtctgctagccaccatcaccatcaccac

SEQ ID NO: 224 - DNA, 774 bp, Artificial Sequence
  Description of Artificial Sequence: Synthetic polynucleotide
caagtgcagctgcaagagagcggaggaggaagcgtgcaagccggaggctctctgagactgagctgtgccgcctctaggtatctgtacagcatcgactacatggcttggttcagacagagccccggcaaggagagggagccagtggctgtcatctacactgcctccggcgccacattctatccagatagcgtgaagggaaggttcactatcagccaagataacgccaagatgacagtgtatctgcagatgaactctctgaagagcgaggacactgccatgtactactgtgccgccgtgaggaagacagatagctacctcttcgacgcccagagcttcacatactggggccaaggcacacaagtgacagtctcgagcggcggaggatcccaagtgcagctgcaagagagcggaggaggaagcgtgcaagccggcggatctctgagactcagctgtactgcctccggcttcacattcgacgatagggagatgaactggtataggcaagcccccggcaatgagtgcgagctggtgagcacaatctccagcgatggcagcacttactacgccgatagcgtgaagggaaggttcactatctcccaagataacgccaagaacacagtctatctgcagatggactccgtcaagccagaggatactgccgtgtactactgcgccgccgacttcatgatcgccatccaagcccccggcgctggctgttggggacaaggcactcaagtgacagtctcgtctgctagccaccatcaccatcaccac

SEQ ID NO: 225 - DNA, 768 bp, Artificial Sequence
  Description of Artificial Sequence: Synthetic polynucleotide
caagtgcagctgcaagagagcggaggaggaagcgtgcaagccggaggctctctgagactgagctgtgccgcctctaggtatctgtacagcatcgactacatggcttggttcagacagagccccggcaaggagagggagccagtggctgtcatctacactgcctccggcgccacattctatccagatagcgtgaagggaaggttcactatcagccaagataacgccaagatgacagtgtatctgcagatgaactctctgaagagcgaggacactgccatgtactactgtgccgccgtgaggaagacagatagctacctcttcgacgcccagagcttcacatactggggccaaggcacacaagtgacagtctcgagcggcggaggatcccaagtgcagctgcaagagagcggaggaggcagcgtgcaagccggaggctctctgagactgagctgtgtggctagtggctacacaagctgcatgggctggtttaggcaagcccccggcaaggagagagaggccgtggccacaatctacactaggggaaggagcatctactacgccgacagcgtgaaaggaaggttcacaatcagccaagataacgccaagaacactctgtatctgcagatgaacagcctcaagccagaggacatcgccatgtatagctgtgctgctggcggctatagctggagcgctggctgcgagttcaattactggggccaaggcacacaagtgactgtctcgtctgctagccaccatcaccatcaccac

SEQ ID NO: 226 - DNA, 786 bp, Artificial Sequence; identical to SEQ ID NO: 85
  Description of Artificial Sequence: Synthetic polynucleotide

SEQ ID NO: 227 - DNA, 792 bp, Artificial Sequence; identical to SEQ ID NO: 86
  Description of Artificial Sequence: Synthetic polynucleotide

SEQ ID NO: 228 - DNA, 774 bp, Artificial Sequence
  Description of Artificial Sequence: Synthetic polynucleotide
caagtgcagctgcaagagagcggaggaggaagcgtgcaagccggaggctctctgaggctgagctgtgccgcctctaggttcacatacagcagctactgcatgggctggttcagacaagcccccggcaaagagagagaaggcgtggccagcatcgatagcgatggctccactagctacactgacagcgtgaagggaaggttcactatcagcaaggacaacgccaagaacactctgtatctgcagatgaactctctgaagccagaggacacagccatgtactactgtgccctcgatctgatgagcacagtggtgcccggcttctgtggctttctgctgagcgctggcatggattactggggcaagggcactcaagtgactgtctcgagcggcggaggatcccaagtgcagctgcaagagagcggaggaggactggtccagcccggcggctctctgaggctgagctgcactgcttccggcttcagcttcagcagctaccctatgacatgggctaggcaagcccccggcaaaggactggaatgggtgagcactattgccagcgatggaggcagcacagcctacgctgccagcgtggagggaaggttcacaatctctagggacaatgccaagagcacactgtatctgcagctgaactctctgaagacagaggacactgccatgtactactgcactaagggctacggcgatggcacaccagctcccggccaaggcacacaagtgactgtctcgtctgctagccaccatcaccatcaccac

SEQ ID NO: 229 - DNA, 783 bp, Artificial Sequence
  Description of Artificial Sequence: Synthetic polynucleotide
caagtgcagctgcaagagagcggaggaggaagcgtgcaagccggaggctctctgaggctgagctgtgccgcctctaggttcacatacagcagctactgcatgggctggttcagacaagcccccggcaaagagagagaaggcgtggccagcatcgatagcgatggctccactagctacactgacagcgtgaagggaaggttcactatcagcaaggacaacgccaagaacactctgtatctgcagatgaactctctgaagccagaggacacagccatgtactactgtgccctcgatctgatgagcacagtggtgcccggcttctgtggctttctgctgagcgctggcatggattactggggcaagggcactcaagtgactgtctcgagcggcggaggatcccaagtgcagctgcaagagagcggaggaggactggtgcagcccggcggctctctgaggctgagctgtgctgccagcggcttcactttcagcagcgctcacatgagctgggtgaggcaagcccccggcaaaggaagggagtggatcgcctccatctacagcggcggcggaacattctacgccgacagcgtgaagggaaggttcacaatctctagggacaacgccaagaacacactgtatctgcagctgaactctctgaaggccgaggacactgccatgtactactgcgccactaataggctgcactactacagcgacgatgattctctgaggggccaaggcacacaagtgacagtctcgtctgctagccaccatcaccatcaccac

SEQ ID NO: 230 - DNA, 786 bp, Artificial Sequence; identical to SEQ ID NO: 87
  Description of Artificial Sequence: Synthetic polynucleotide

SEQ ID NO: 231 - DNA, 780 bp, Artificial Sequence; identical to SEQ ID NO: 88
  Description of Artificial Sequence: Synthetic polynucleotide

SEQ ID NO: 232 - DNA, 798 bp, Artificial Sequence
  Description of Artificial Sequence: Synthetic polynucleotide
caagtgcagctgcaagagagcggaggaggaagcgtgcaagccggaggctctctgaggctgagctgtgccgcctctaggttcacatacagcagctactgcatgggctggttcagacaagcccccggcaaagagagagaaggcgtggccagcatcgatagcgatggctccactagctacactgacagcgtgaagggaaggttcactatcagcaaggacaacgccaagaacactctgtatctgcagatgaactctctgaagccagaggacacagccatgtactactgtgccctcgatctgatgagcacagtggtgcccggcttctgtggctttctgctgagcgctggcatggattactggggcaagggcactcaagtgactgtctcgagcggcggaggatcccaagtgcagctgcaagagagcggaggcggaagcgtgcaagctggaggatctctgaggctgagctgcacagccagcggcttcactttcgatgacagcgacatgggctggtataggcaagcccccggcaatgagtgtgagctggtgagcacaatcagcagcgacggctccacttactacgccgacagcgtcaagggaaggttcacaatcagccaagataacgccaagaacactgtgtatctgcagatgaactctctgaagccagaggacacagccgtgtactactgtgctgccgagcctaggggctactatagcaactacggcggaaggagggagtgcaattactggggccaaggcacacaagtgacagtctcgtctgctagccaccatcaccatcaccac

SEQ ID NO: 233 - DNA, 804 bp, Artificial Sequence; identical to SEQ ID NO: 89
  Description of Artificial Sequence: Synthetic polynucleotide

SEQ ID NO: 234 - DNA, 780 bp, Artificial Sequence
  Description of Artificial Sequence: Synthetic polynucleotide
caagtgcagctgcaagagtccggaggaggcagcgtccaagccggaggctctctgaggctgagctgtgctgccagcggctacacttacagcatgtactgcatgggctggttcagacaagcccccggcaaggaaagagagggcgtggcccagatcaatagcgatggcagcacaagctacgccgacagcgtgaagggaaggttcactatctccaaggacaacgccaagaacactctgtatctgcagatgaactctctgaagccagaggacactgccatgtactactgcgctgccgattctagggtgtacggcggcagctggtatgagaggctctgcggcccttacacatacgagtacaactactggggccaaggcacacaagtgactgtctcgagcggcggaggatcccaagtgcagctgcaagagagcggaggaggactggtccagcccggcggctctctgaggctgagctgcactgcttccggcttcagcttcagcagctaccctatgacatgggctaggcaagcccccggcaaaggactggaatgggtgagcactattgccagcgatggaggcagcacagcctacgctgccagcgtggagggaaggttcacaatctctagggacaatgccaagagcacactgtatctgcagctgaactctctgaagacagaggacactgccatgtactactgcactaagggctacggcgatggcacaccagctcccggccaaggcacacaagtgactgtctcgtctgctagccaccatcaccatcaccac

SEQ ID NO: 235 - DNA, 789 bp, Artificial Sequence
  Description of Artificial Sequence: Synthetic polynucleotide
caagtgcagctgcaagagtccggaggaggcagcgtccaagccggaggctctctgaggctgagctgtgctgccagcggctacacttacagcatgtactgcatgggctggttcagacaagcccccggcaaggaaagagagggcgtggcccagatcaatagcgatggcagcacaagctacgccgacagcgtgaagggaaggttcactatctccaaggacaacgccaagaacactctgtatctgcagatgaactctctgaagccagaggacactgccatgtactactgcgctgccgattctagggtgtacggcggcagctggtatgagaggctctgcggcccttacacatacgagtacaactactggggccaaggcacacaagtgactgtctcgagcggcggaggatcccaagtgcagctgcaagagagcggaggaggactggtgcagcccggcggctctctgaggctgagctgtgctgccagcggcttcactttcagcagcgctcacatgagctgggtgaggcaagcccccggcaaaggaagggagtggatcgcctccatctacagcggcggcggaacattctacgccgacagcgtgaagggaaggttcacaatctctagggacaacgccaagaacacactgtatctgcagctgaactctctgaaggccgaggacactgccatgtactactgcgccactaataggctgcactactacagcgacgatgattctctgaggggccaaggcacacaagtgacagtctcgtctgctagccaccatcaccatcaccac

SEQ ID NO: 236 - DNA, 792 bp, Artificial Sequence
  Description of Artificial Sequence: Synthetic polynucleotide
caagtgcagctgcaagagtccggaggaggcagcgtccaagccggaggctctctgaggctgagctgtgctgccagcggctacacttacagcatgtactgcatgggctggttcagacaagcccccggcaaggaaagagagggcgtggcccagatcaatagcgatggcagcacaagctacgccgacagcgtgaagggaaggttcactatctccaaggacaacgccaagaacactctgtatctgcagatgaactctctgaagccagaggacactgccatgtactactgcgctgccgattctagggtgtacggcggcagctggtatgagaggctctgcggcccttacacatacgagtacaactactggggccaaggcacacaagtgactgtctcgagcggcggaggatcccaagtgcagctgcaagagagcggaggaggaagcgtgcaagccggcggatctctgagactcagctgtactgcctccggcttcacattcgacgatagggagatgaactggtataggcaagcccccggcaatgagtgcgagctggtgagcacaatctccagcgatggcagcacttactacgccgatagcgtgaagggaaggttcactatctcccaagataacgccaagaacacagtctatctgcagatggactccgtcaagccagaggatactgccgtgtactactgcgccgccgacttcatgatcgccatccaagcccccggcgctggctgttggggacaaggcactcaagtgacagtctcgtctgctagccaccatcaccatcaccac

SEQ ID NO: 237 - DNA, 786 bp, Artificial Sequence
  Description of Artificial Sequence: Synthetic polynucleotide
caagtgcagctgcaagagtccggaggaggcagcgtccaagccggaggctctctgaggctgagctgtgctgccagcggctacacttacagcatgtactgcatgggctggttcagacaagcccccggcaaggaaagagagggcgtggcccagatcaatagcgatggcagcacaagctacgccgacagcgtgaagggaaggttcactatctccaaggacaacgccaagaacactctgtatctgcagatgaactctctgaagccagaggacactgccatgtactactgcgctgccgattctagggtgtacggcggcagctggtatgagaggctctgcggcccttacacatacgagtacaactactggggccaaggcacacaagtgactgtctcgagcggcggaggatcccaagtgcagctgcaagagagcggaggaggcagcgtgcaagccggaggctctctgagactgagctgtgtggctagtggctacacaagctgcatgggctggtttaggcaagcccccggcaaggagagagaggccgtggccacaatctacactaggggaaggagcatctactacgccgacagcgtgaaaggaaggttcacaatcagccaagataacgccaagaacactctgtatctgcagatgaacagcctcaagccagaggacatcgccatgtatagctgtgctgctggcggctatagctggagcgctggctgcgagttcaattactggggccaaggcacacaagtgactgtctcgtctgctagccaccatcaccatcaccac

SEQ ID NO: 238 - DNA, 804 bp, Artificial Sequence; identical to SEQ ID NO: 90
  Description of Artificial Sequence: Synthetic polynucleotide

SEQ ID NO: 239 - DNA, 810 bp, Artificial Sequence
  Description of Artificial Sequence: Synthetic polynucleotide
caagtgcagctgcaagagtccggaggaggcagcgtccaagccggaggctctctgaggctgagctgtgctgccagcggctacacttacagcatgtactgcatgggctggttcagacaagcccccggcaaggaaagagagggcgtggcccagatcaatagcgatggcagcacaagctacgccgacagcgtgaagggaaggttcactatctccaaggacaacgccaagaacactctgtatctgcagatgaactctctgaagccagaggacactgccatgtactactgcgctgccgattctagggtgtacggcggcagctggtatgagaggctctgcggcccttacacatacgagtacaactactggggccaaggcacacaagtgactgtctcgagcggcggaggatcccaagtgcagctgcaagagagcggaggaggaagcgtgcaagccggaggctctctgaggctgagctgtgtggctagtggctacactttcagcagctactgcatgggctggttcagacaagcccccggcaaggaaagggaaggagtggccgctctgggcggaggaagcacatactacgctgacagcgtgaagggaaggttcacaatcagccaagataacgccaagaacacactgtatctgcagatgaactctctgaagccagaggacacagccatgtactactgtgccgctgcttgggtcgcttgtctggagttcggcggcagctggtacgatctggctaggtacaagcactggggccaaggcacacaagtgacagtctcgtctgctagccaccatcaccatcaccac

SEQ ID NO: 240 - DNA, 789 bp, Artificial Sequence
  Description of Artificial Sequence: Synthetic polynucleotide
caagtgcagctgcaagagagcggcggaggaagcgtgcaagccggaggatctctgagactgagctgcgctgtgagcggctacgcctactccacatactgcatgggctggtttaggcaagcccccggcaaagagagagagggcgtggctgctatcgatagcggcggcagcacaagctacgccgatagcgtgaagggaaggttcacaatcagcaaggacaacgccaagaacacactgtatctgaggatgaactctctgaagccagaggacacagccatgtactactgtgctgctgtgcctcctcctccagatggcggcagctgtctgtttctgggaccagagatcaaggtcagcaaggccgattttaggtactggggccaaggcacacaagtgacagtctcgagcggcggaggatcccaagtgcagctgcaagagagcggaggaggactggtccagcccggcggctctctgaggctgagctgcactgcttccggcttcagcttcagcagctaccctatgacatgggctaggcaagcccccggcaaaggactggaatgggtgagcactattgccagcgatggaggcagcacagcctacgctgccagcgtggagggaaggttcacaatctctagggacaatgccaagagcacactgtatctgcagctgaactctctgaagacagaggacactgccatgtactactgcactaagggctacggcgatggcacaccagctcccggccaaggcacacaagtgactgtctcgtctgctagccaccatcaccatcaccac

SEQ ID NO: 241 - DNA, 798 bp, Artificial Sequence
  Description of Artificial Sequence: Synthetic polynucleotide
caagtgcagctgcaagagagcggcggaggaagcgtgcaagccggaggatctctgagactgagctgcgctgtgagcggctacgcctactccacatactgcatgggctggtttaggcaagcccccggcaaagagagagagggcgtggctgctatcgatagcggcggcagcacaagctacgccgatagcgtgaagggaaggttcacaatcagcaaggacaacgccaagaacacactgtatctgaggatgaactctctgaagccagaggacacagccatgtactactgtgctgctgtgcctcctcctccagatggcggcagctgtctgtttctgggaccagagatcaaggtcagcaaggccgattttaggtactggggccaaggcacacaagtgacagtctcgagcggcggaggatcccaagtgcagctgcaagagagcggaggaggactggtgcagcccggcggctctctgaggctgagctgtgctgccagcggcttcactttcagcagcgctcacatgagctgggtgaggcaagcccccggcaaaggaagggagtggatcgcctccatctacagcggcggcggaacattctacgccgacagcgtgaagggaaggttcacaatctctagggacaacgccaagaacacactgtatctgcagctgaactctctgaaggccgaggacactgccatgtactactgcgccactaataggctgcactactacagcgacgatgattctctgaggggccaaggcacacaagtgacagtctcgtctgctagccaccatcaccatcaccac

SEQ ID NO: 242 - DNA, 801 bp, Artificial Sequence
  Description of Artificial Sequence: Synthetic polynucleotide
caagtgcagctgcaagagagcggcggaggaagcgtgcaagccggaggatctctgagactgagctgcgctgtgagcggctacgcctactccacatactgcatgggctggtttaggcaagcccccggcaaagagagagagggcgtggctgctatcgatagcggcggcagcacaagctacgccgatagcgtgaagggaaggttcacaatcagcaaggacaacgccaagaacacactgtatctgaggatgaactctctgaagccagaggacacagccatgtactactgtgctgctgtgcctcctcctccagatggcggcagctgtctgtttctgggaccagagatcaaggtcagcaaggccgattttaggtactggggccaaggcacacaagtgacagtctcgagcggcggaggatcccaagtgcagctgcaagagagcggaggaggaagcgtgcaagccggcggatctctgagactcagctgtactgcctccggcttcacattcgacgatagggagatgaactggtataggcaagcccccggcaatgagtgcgagctggtgagcacaatctccagcgatggcagcacttactacgccgatagcgtgaagggaaggttcactatctcccaagataacgccaagaacacagtctatctgcagatggactccgtcaagccagaggatactgccgtgtactactgcgccgccgacttcatgatcgccatccaagcccccggcgctggctgttggggacaaggcactcaagtgacagtctcgtctgctagccaccatcaccatcaccac

SEQ ID NO: 243 - DNA, 795 bp, Artificial Sequence
  Description of Artificial Sequence: Synthetic polynucleotide
caagtgcagctgcaagagagcggcggaggaagcgtgcaagccggaggatctctgagactgagctgcgctgtgagcggctacgcctactccacatactgcatgggctggtttaggcaagcccccggcaaagagagagagggcgtggctgctatcgatagcggcggcagcacaagctacgccgatagcgtgaagggaaggttcacaatcagcaaggacaacgccaagaacacactgtatctgaggatgaactctctgaagccagaggacacagccatgtactactgtgctgctgtgcctcctcctccagatggcggcagctgtctgtttctgggaccagagatcaaggtcagcaaggccgattttaggtactggggccaaggcacacaagtgacagtctcgagcggcggaggatcccaagtgcagctgcaagagagcggaggaggcagcgtgcaagccggaggctctctgagactgagctgtgtggctagtggctacacaagctgcatgggctggtttaggcaagcccccggcaaggagagagaggccgtggccacaatctacactaggggaaggagcatctactacgccgacagcgtgaaaggaaggttcacaatcagccaagataacgccaagaacactctgtatctgcagatgaacagcctcaagccagaggacatcgccatgtatagctgtgctgctggcggctatagctggagcgctggctgcgagttcaattactggggccaaggcacacaagtgactgtctcgtctgctagccaccatcaccatcaccac

SEQ ID NO: 244 - DNA, 813 bp, Artificial Sequence
  Description of Artificial Sequence: Synthetic polynucleotide
caagtgcagctgcaagagagcggcggaggaagcgtgcaagccggaggatctctgagactgagctgcgctgtgagcggctacgcctactccacatactgcatgggctggtttaggcaagcccccggcaaagagagagagggcgtggctgctatcgatagcggcggcagcacaagctacgccgatagcgtgaagggaaggttcacaatcagcaaggacaacgccaagaacacactgtatctgaggatgaactctctgaagccagaggacacagccatgtactactgtgctgctgtgcctcctcctccagatggcggcagctgtctgtttctgggaccagagatcaaggtcagcaaggccgattttaggtactggggccaaggcacacaagtgacagtctcgagcggcggaggatcccaagtgcagctgcaagagagcggaggcggaagcgtgcaagctggaggatctctgaggctgagctgcacagccagcggcttcactttcgatgacagcgacatgggctggtataggcaagcccccggcaatgagtgtgagctggtgagcacaatcagcagcgacggctccacttactacgccgacagcgtcaagggaaggttcacaatcagccaagataacgccaagaacactgtgtatctgcagatgaactctctgaagccagaggacacagccgtgtactactgtgctgccgagcctaggggctactatagcaactacggcggaaggagggagtgcaattactggggccaaggcacacaagtgacagtctcgtctgctagccaccatcaccatcaccac

SEQ ID NO: 245 - DNA, 819 bp, Artificial Sequence
  Description of Artificial Sequence: Synthetic polynucleotide
caagtgcagctgcaagagagcggcggaggaagcgtgcaagccggaggatctctgagactgagctgcgctgtgagcggctacgcctactccacatactgcatgggctggtttaggcaagcccccggcaaagagagagagggcgtggctgctatcgatagcggcggcagcacaagctacgccgatagcgtgaagggaaggttcacaatcagcaaggacaacgccaagaacacactgtatctgaggatgaactctctgaagccagaggacacagccatgtactactgtgctgctgtgcctcctcctccagatggcggcagctgtctgtttctgggaccagagatcaaggtcagcaaggccgattttaggtactggggccaaggcacacaagtgacagtctcgagcggcggaggatcccaagtgcagctgcaagagagcggaggaggaagcgtgcaagccggaggctctctgaggctgagctgtgtggctagtggctacactttcagcagctactgcatgggctggttcagacaagcccccggcaaggaaagggaaggagtggccgctctgggcggaggaagcacatactacgctgacagcgtgaagggaaggttcacaatcagccaagataacgccaagaacacactgtatctgcagatgaactctctgaagccagaggacacagccatgtactactgtgccgctgcttgggtcgcttgtctggagttcggcggcagctggtacgatctggctaggtacaagcactggggccaaggcacacaagtgacagtctcgtctgctagccaccatcaccatcaccac

SEQ ID NO: 246 - DNA, 768 bp, Artificial Sequence
  Description of Artificial Sequence: Synthetic polynucleotide
caagtgcagctgcaagagagcggaggaggaagcgtgcaagccggaggctctctgaggctgagctgtacagtgtccggctacacttacagctccaattgcatgggctggtttaggcaagcccccggcaaggaaagagagggcgtggccactatctacactggcggcggcaacacatactacgccgatagcgtgaagggaaggttcactatcagccaagataacgccaagaacacagtgtatctgcagatgaacaatctgaagccagaggacactgccatgtactactgtgctgctgagccactgtctagggtgtacggcggcagctgcccaactcctacattcgactactggggccaaggcacacaagtgactgtctcgagcggcggaggatcccaagtgcagctgcaagagagcggaggaggactggtccagcccggcggctctctgaggctgagctgcactgcttccggcttcagcttcagcagctaccctatgacatgggctaggcaagcccccggcaaaggactggaatgggtgagcactattgccagcgatggaggcagcacagcctacgctgccagcgtggagggaaggttcacaatctctagggacaatgccaagagcacactgtatctgcagctgaactctctgaagacagaggacactgccatgtactactgcactaagggctacggcgatggcacaccagctcccggccaaggcacacaagtgactgtctcgtctgctagccaccatcaccatcaccac

SEQ ID NO: 247 - DNA, 777 bp, Artificial Sequence
  Description of Artificial Sequence: Synthetic polynucleotide
caagtgcagctgcaagagagcggaggaggaagcgtgcaagccggaggctctctgaggctgagctgtacagtgtccggctacacttacagctccaattgcatgggctggtttaggcaagcccccggcaaggaaagagagggcgtggccactatctacactggcggcggcaacacatactacgccgatagcgtgaagggaaggttcactatcagccaagataacgccaagaacacagtgtatctgcagatgaacaatctgaagccagaggacactgccatgtactactgtgctgctgagccactgtctagggtgtacggcggcagctgcccaactcctacattcgactactggggccaaggcacacaagtgactgtctcgagcggcggaggatcccaagtgcagctgcaagagagcggaggaggactggtgcagcccggcggctctctgaggctgagctgtgctgccagcggcttcactttcagcagcgctcacatgagctgggtgaggcaagcccccggcaaaggaagggagtggatcgcctccatctacagcggcggcggaacattctacgccgacagcgtgaagggaaggttcacaatctctagggacaacgccaagaacacactgtatctgcagctgaactctctgaaggccgaggacactgccatgtactactgcgccactaataggctgcactactacagcgacgatgattctctgaggggccaaggcacacaagtgacagtctcgtctgctagccaccatcaccatcaccac

SEQ ID NO: 248 - DNA, 780 bp, Artificial Sequence
  Description of Artificial Sequence: Synthetic polynucleotide
caagtgcagctgcaagagagcggaggaggaagcgtgcaagccggaggctctctgaggctgagctgtacagtgtccggctacacttacagctccaattgcatgggctggtttaggcaagcccccggcaaggaaagagagggcgtggccactatctacactggcggcggcaacacatactacgccgatagcgtgaagggaaggttcactatcagccaagataacgccaagaacacagtgtatctgcagatgaacaatctgaagccagaggacactgccatgtactactgtgctgctgagccactgtctagggtgtacggcggcagctgcccaactcctacattcgactactggggccaaggcacacaagtgactgtctcgagcggcggaggatcccaagtgcagctgcaagagagcggaggaggaagcgtgcaagccggcggatctctgagactcagctgtactgcctccggcttcacattcgacgatagggagatgaactggtataggcaagcccccggcaatgagtgcgagctggtgagcacaatctccagcgatggcagcacttactacgccgatagcgtgaagggaaggttcactatctcccaagataacgccaagaacacagtctatctgcagatggactccgtcaagccagaggatactgccgtgtactactgcgccgccgacttcatgatcgccatccaagcccccggcgctggctgttggggacaaggcactcaagtgacagtctcgtctgctagccaccatcaccatcaccac

SEQ ID NO: 249 - DNA, 774 bp, Artificial Sequence
  Description of Artificial Sequence: Synthetic polynucleotide
caagtgcagctgcaagagagcggaggaggaagcgtgcaagccggaggctctctgaggctgagctgtacagtgtccggctacacttacagctccaattgcatgggctggtttaggcaagcccccggcaaggaaagagagggcgtggccactatctacactggcggcggcaacacatactacgccgatagcgtgaagggaaggttcactatcagccaagataacgccaagaacacagtgtatctgcagatgaacaatctgaagccagaggacactgccatgtactactgtgctgctgagccactgtctagggtgtacggcggcagctgcccaactcctacattcgactactggggccaaggcacacaagtgactgtctcgagcggcggaggatcccaagtgcagctgcaagagagcggaggaggcagcgtgcaagccggaggctctctgagactgagctgtgtggctagtggctacacaagctgcatgggctggtttaggcaagcccccggcaaggagagagaggccgtggccacaatctacactaggggaaggagcatctactacgccgacagcgtgaaaggaaggttcacaatcagccaagataacgccaagaacactctgtatctgcagatgaacagcctcaagccagaggacatcgccatgtatagctgtgctgctggcggctatagctggagcgctggctgcgagttcaattactggggccaaggcacacaagtgactgtctcgtctgctagccaccatcaccatcaccac

SEQ ID NO: 250 - DNA, 792 bp, Artificial Sequence
  Description of Artificial Sequence: Synthetic polynucleotide
caagtgcagctgcaagagagcggaggaggaagcgtgcaagccggaggctctctgaggctgagctgtacagtgtccggctacacttacagctccaattgcatgggctggtttaggcaagcccccggcaaggaaagagagggcgtggccactatctacactggcggcggcaacacatactacgccgatagcgtgaagggaaggttcactatcagccaagataacgccaagaacacagtgtatctgcagatgaacaatctgaagccagaggacactgccatgtactactgtgctgctgagccactgtctagggtgtacggcggcagctgcccaactcctacattcgactactggggccaaggcacacaagtgactgtctcgagcggcggaggatcccaagtgcagctgcaagagagcggaggcggaagcgtgcaagctggaggatctctgaggctgagctgcacagccagcggcttcactttcgatgacagcgacatgggctggtataggcaagcccccggcaatgagtgtgagctggtgagcacaatcagcagcgacggctccacttactacgccgacagcgtcaagggaaggttcacaatcagccaagataacgccaagaacactgtgtatctgcagatgaactctctgaagccagaggacacagccgtgtactactgtgctgccgagcctaggggctactatagcaactacggcggaaggagggagtgcaattactggggccaaggcacacaagtgacagtctcgtctgctagccaccatcaccatcaccac

SEQ ID NO: 251 - DNA, 798 bp, Artificial Sequence
  Description of Artificial Sequence: Synthetic polynucleotide
caagtgcagctgcaagagagcggaggaggaagcgtgcaagccggaggctctctgaggctgagctgtacagtgtccggctacacttacagctccaattgcatgggctggtttaggcaagcccccggcaaggaaagagagggcgtggccactatctacactggcggcggcaacacatactacgccgatagcgtgaagggaaggttcactatcagccaagataacgccaagaacacagtgtatctgcagatgaacaatctgaagccagaggacactgccatgtactactgtgctgctgagccactgtctagggtgtacggcggcagctgcccaactcctacattcgactactggggccaaggcacacaagtgactgtctcgagcggcggaggatcccaagtgcagctgcaagagagcggaggaggaagcgtgcaagccggaggctctctgaggctgagctgtgtggctagtggctacactttcagcagctactgcatgggctggttcagacaagcccccggcaaggaaagggaaggagtggccgctctgggcggaggaagcacatactacgctgacagcgtgaagggaaggttcacaatcagccaagataacgccaagaacacactgtatctgcagatgaactctctgaagccagaggacacagccatgtactactgtgccgctgcttgggtcgcttgtctggagttcggcggcagctggtacgatctggctaggtacaagcactggggccaaggcacacaagtgacagtctcgtctgctagccaccatcaccatcaccac

SEQ ID NO: 252 - DNA, 765 bp, Artificial Sequence
  Description of Artificial Sequence: Synthetic polynucleotide
caagtgcagctgcaagagagcggaggaggaagcgtccaagccggaggctctctgaggctgagctgtggagccagcggctacacttacagcagctactgtatgggctggtttaggcaagtgcccggcaaggagagagagggcgtggccgtgatcgattccgatggcagcacaagctacgctgacagcgtgaagggaaggttcacaatcagcaaggacaacggcaagaacacactctatctgcagatgaacagcctcaagccagaggacacagccatgtactactgcgccgctgatctgggccactataggcctccttgtggcgtgctgtatctgggcatggattactggggcaagggcacacaagtgacagtctcgagcggcggaggatcccaagtgcagctgcaagagagcggaggaggactggtccagcccggcggctctctgaggctgagctgcactgcttccggcttcagcttcagcagctaccctatgacatgggctaggcaagcccccggcaaaggactggaatgggtgagcactattgccagcgatggaggcagcacagcctacgctgccagcgtggagggaaggttcacaatctctagggacaatgccaagagcacactgtatctgcagctgaactctctgaagacagaggacactgccatgtactactgcactaagggctacggcgatggcacaccagctcccggccaaggcacacaagtgactgtctcgtctgctagccaccatcaccatcaccac

SEQ ID NO: 253 - DNA, 774 bp, Artificial Sequence
  Description of Artificial Sequence: Synthetic polynucleotide
caagtgcagctgcaagagagcggaggaggaagcgtccaagccggaggctctctgaggctgagctgtggagccagcggctacacttacagcagctactgtatgggctggtttaggcaagtgcccggcaaggagagagagggcgtggccgtgatcgattccgatggcagcacaagctacgctgacagcgtgaagggaaggttcacaatcagcaaggacaacggcaagaacacactctatctgcagatgaacagcctcaagccagaggacacagccatgtactactgcgccgctgatctgggccactataggcctccttgtggcgtgctgtatctgggcatggattactggggcaagggcacacaagtgacagtctcgagcggcggaggatcccaagtgcagctgcaagagagcggaggaggactggtgcagcccggcggctctctgaggctgagctgtgctgccagcggcttcactttcagcagcgctcacatgagctgggtgaggcaagcccccggcaaaggaagggagtggatcgcctccatctacagcggcggcggaacattctacgccgacagcgtgaagggaaggttcacaatctctagggacaacgccaagaacacactgtatctgcagctgaactctctgaaggccgaggacactgccatgtactactgcgccactaataggctgcactactacagcgacgatgattctctgaggggccaaggcacacaagtgacagtctcgtctgctagccaccatcaccatcaccac

SEQ ID NO: 254 - DNA, 777 bp, Artificial Sequence; identical to SEQ ID NO: 91
  Description of Artificial Sequence: Synthetic polynucleotide

SEQ ID NO: 255 - DNA, 771 bp, Artificial Sequence; identical to SEQ ID NO: 92
  Description of Artificial Sequence: Synthetic polynucleotide

SEQ ID NO: 256 - DNA, 789 bp, Artificial Sequence
  Description of Artificial Sequence: Synthetic polynucleotide
caagtgcagctgcaagagagcggaggaggaagcgtccaagccggaggctctctgaggctgagctgtggagccagcggctacacttacagcagctactgtatgggctggtttaggcaagtgcccggcaaggagagagagggcgtggccgtgatcgattccgatggcagcacaagctacgctgacagcgtgaagggaaggttcacaatcagcaaggacaacggcaagaacacactctatctgcagatgaacagcctcaagccagaggacacagccatgtactactgcgccgctgatctgggccactataggcctccttgtggcgtgctgtatctgggcatggattactggggcaagggcacacaagtgacagtctcgagcggcggaggatcccaagtgcagctgcaagagagcggaggcggaagcgtgcaagctggaggatctctgaggctgagctgcacagccagcggcttcactttcgatgacagcgacatgggctggtataggcaagcccccggcaatgagtgtgagctggtgagcacaatcagcagcgacggctccacttactacgccgacagcgtcaagggaaggttcacaatcagccaagataacgccaagaacactgtgtatctgcagatgaactctctgaagccagaggacacagccgtgtactactgtgctgccgagcctaggggctactatagcaactacggcggaaggagggagtgcaattactggggccaaggcacacaagtgacagtctcgtctgctagccaccatcaccatcaccac

SEQ ID NO: 257 - DNA, 795 bp, Artificial Sequence; identical to SEQ ID NO: 93
  Description of Artificial Sequence: Synthetic polynucleotide

SEQ ID NO: 258 - DNA, 768 bp, Artificial Sequence
  Description of Artificial Sequence: Synthetic polynucleotide
caagtgcagctgcaagagagcggaggaggaagcgtccaagccggaggctctctgagactgagctgtgccgccagcggctactccaactgcagctacgacatgacttggtataggcaagcccccggcaaggagagggagttcgtgtccgccatccacagcgacggcagcactagatacgccgacagcgtgaagggaaggttcttcatcagccaagataacgccaagaacacagtgtatctgcagatgaactccctcaagccagaggacactgccatgtactactgcaagacagacccactgcactgcagagcccatggcggcagctggtatagcgtgagggccaactactggggccaaggcacacaagtgacagtctcgagcggcggaggatcccaagtgcagctgcaagagagcggaggaggactggtccagcccggcggctctctgaggctgagctgcactgcttccggcttcagcttcagcagctaccctatgacatgggctaggcaagcccccggcaaaggactggaatgggtgagcactattgccagcgatggaggcagcacagcctacgctgccagcgtggagggaaggttcacaatctctagggacaatgccaagagcacactgtatctgcagctgaactctctgaagacagaggacactgccatgtactactgcactaagggctacggcgatggcacaccagctcccggccaaggcacacaagtgactgtctcgtctgctagccaccatcaccatcaccac

SEQ ID NO: 259 - DNA, 777 bp, Artificial Sequence
  Description of Artificial Sequence: Synthetic polynucleotide
caagtgcagctgcaagagagcggaggaggaagcgtccaagccggaggctctctgagactgagctgtgccgccagcggctactccaactgcagctacgacatgacttggtataggcaagcccccggcaaggagagggagttcgtgtccgccatccacagcgacggcagcactagatacgccgacagcgtgaagggaaggttcttcatcagccaagataacgccaagaacacagtgtatctgcagatgaactccctcaagccagaggacactgccatgtactactgcaagacagacccactgcactgcagagcccatggcggcagctggtatagcgtgagggccaactactggggccaaggcacacaagtgacagtctcgagcggcggaggatcccaagtgcagctgcaagagagcggaggaggactggtgcagcccggcggctctctgaggctgagctgtgctgccagcggcttcactttcagcagcgctcacatgagctgggtgaggcaagcccccggcaaaggaagggagtggatcgcctccatctacagcggcggcggaacattctacgccgacagcgtgaagggaaggttcacaatctctagggacaacgccaagaacacactgtatctgcagctgaactctctgaaggccgaggacactgccatgtactactgcgccactaataggctgcactactacagcgacgatgattctctgaggggccaaggcacacaagtgacagtctcgtctgctagccaccatcaccatcaccac

SEQ ID NO: 260 - DNA, 780 bp, Artificial Sequence; identical to SEQ ID NO: 94
  Description of Artificial Sequence: Synthetic polynucleotide

SEQ ID NO: 261 - DNA, 774 bp, Artificial Sequence
  Description of Artificial Sequence: Synthetic polynucleotide
caagtgcagctgcaagagagcggaggaggaagcgtccaagccggaggctctctgagactgagctgtgccgccagcggctactccaactgcagctacgacatgacttggtataggcaagcccccggcaaggagagggagttcgtgtccgccatccacagcgacggcagcactagatacgccgacagcgtgaagggaaggttcttcatcagccaagataacgccaagaacacagtgtatctgcagatgaactccctcaagccagaggacactgccatgtactactgcaagacagacccactgcactgcagagcccatggcggcagctggtatagcgtgagggccaactactggggccaaggcacacaagtgacagtctcgagcggcggaggatcccaagtgcagctgcaagagagcggaggaggcagcgtgcaagccggaggctctctgagactgagctgtgtggctagtggctacacaagctgcatgggctggtttaggcaagcccccggcaaggagagagaggccgtggccacaatctacactaggggaaggagcatctactacgccgacagcgtgaaaggaaggttcacaatcagccaagataacgccaagaacactctgtatctgcagatgaacagcctcaagccagaggacatcgccatgtatagctgtgctgctggcggctatagctggagcgctggctgcgagttcaattactggggccaaggcacacaagtgactgtctcgtctgctagccaccatcaccatcaccac

SEQ ID NO: 262 - DNA, 792 bp, Artificial Sequence
  Description of Artificial Sequence: Synthetic polynucleotide
caagtgcagctgcaagagagcggaggaggaagcgtccaagccggaggctctctgagactgagctgtgccgccagcggctactccaactgcagctacgacatgacttggtataggcaagcccccggcaaggagagggagttcgtgtccgccatccacagcgacggcagcactagatacgccgacagcgtgaagggaaggttcttcatcagccaagataacgccaagaacacagtgtatctgcagatgaactccctcaagccagaggacactgccatgtactactgcaagacagacccactgcactgcagagcccatggcggcagctggtatagcgtgagggccaactactggggccaaggcacacaagtgacagtctcgagcggcggaggatcccaagtgcagctgcaagagagcggaggcggaagcgtgcaagctggaggatctctgaggctgagctgcacagccagcggcttcactttcgatgacagcgacatgggctggtataggcaagcccccggcaatgagtgtgagctggtgagcacaatcagcagcgacggctccacttactacgccgacagcgtcaagggaaggttcacaatcagccaagataacgccaagaacactgtgtatctgcagatgaactctctgaagccagaggacacagccgtgtactactgtgctgccgagcctaggggctactatagcaactacggcggaaggagggagtgcaattactggggccaaggcacacaagtgacagtctcgtctgctagccaccatcaccatcaccac

SEQ ID NO: 263 - DNA, 798 bp, Artificial Sequence; identical to SEQ ID NO: 95
  Description of Artificial Sequence: Synthetic polynucleotide

SEQ ID NO: 264 - protein, 9 aa, Artificial Sequence
  Description of Artificial Sequence: Synthetic peptide
YLYSIDYMA

SEQ ID NO: 265 - protein, 9 aa, Artificial Sequence
  Description of Artificial Sequence: Synthetic peptide
FTYSSYCMG

SEQ ID NO: 266 - protein, 9 aa, Artificial Sequence
  Description of Artificial Sequence: Synthetic peptide
YTYSMYCMG

SEQ ID NO: 267 - protein, 9 aa, Artificial Sequence
  Description of Artificial Sequence: Synthetic peptide
YTYSSNCMG

SEQ ID NO: 268 - protein, 9 aa, Artificial Sequence
  Description of Artificial Sequence: Synthetic peptide
YTYSSYCMG

SEQ ID NO: 269 - protein, 9 aa, Artificial Sequence
  Description of Artificial Sequence: Synthetic peptide
YSNCSYDMT

SEQ ID NO: 270 - protein, 9 aa, Artificial Sequence
  Description of Artificial Sequence: Synthetic peptide
FSFSSYPMT

SEQ ID NO: 271 - protein, 9 aa, Artificial Sequence
  Description of Artificial Sequence: Synthetic peptide
FTFSSAHMS

SEQ ID NO: 272 - protein, 9 aa, Artificial Sequence
  Description of Artificial Sequence: Synthetic peptide
FTFDDREMN

SEQ ID NO: 273 - protein, 6 aa, Artificial Sequence
  Description of Artificial Sequence: Synthetic peptide
YTSCMG

SEQ ID NO: 274 - protein, 9 aa, Artificial Sequence
  Description of Artificial Sequence: Synthetic peptide
FTFDDSDMG

SEQ ID NO: 275 - protein, 9 aa, Artificial Sequence
  Description of Artificial Sequence: Synthetic peptide
YTFSSYCMG

SEQ ID NO: 276 - protein, 9 aa, Artificial Sequence
  Description of Artificial Sequence: Synthetic peptide
YLYSIDYMA

SEQ ID NO: 277 - protein, 17 aa, Artificial Sequence
  Description of Artificial Sequence: Synthetic peptide
VIYTASGATFYPDSVKG

SEQ ID NO: 278 - protein, 16 aa, Artificial Sequence
  Description of Artificial Sequence: Synthetic peptide
VRKTDSYLFDAQSFTY

SEQ ID NO: 279 - protein, 9 aa, Artificial Sequence
  Description of Artificial Sequence: Synthetic peptide
YLYSTNYMA

SEQ ID NO: 280 - protein, 17 aa, Artificial Sequence
  Description of Artificial Sequence: Synthetic peptide
VIYTASGATLYTDSVKG

SEQ ID NO: 281 - protein, 16 aa, Artificial Sequence
  Description of Artificial Sequence: Synthetic peptide
VRKTDSYLFDAQSFTY

SEQ ID NO: 282 - protein, 9 aa, Artificial Sequence
  Description of Artificial Sequence: Synthetic peptide
YLYSTNYMA

SEQ ID NO: 283 - protein, 17 aa, Artificial Sequence
  Description of Artificial Sequence: Synthetic peptide
VIYTASGATLYTDSVKG

SEQ ID NO: 284 - protein, 16 aa, Artificial Sequence
  Description of Artificial Sequence: Synthetic peptide
VRKTDSYLFDAQSFTY

SEQ ID NO: 285 - protein, 9 aa, Artificial Sequence
  Description of Artificial Sequence: Synthetic peptide
YLYSIDYMA

SEQ ID NO: 286 - protein, 17 aa, Artificial Sequence
  Description of Artificial Sequence: Synthetic peptide
VIYTASGATFYPDSVKG

SEQ ID NO: 287 - protein, 16 aa, Artificial Sequence
  Description of Artificial Sequence: Synthetic peptide
VRKTDSYLFDAQSFTY

SEQ ID NO: 288 - protein, 9 aa, Artificial Sequence
  Description of Artificial Sequence: Synthetic peptide
YLYSTNYMA

SEQ ID NO: 289 - protein, 17 aa, Artificial Sequence
  Description of Artificial Sequence: Synthetic peptide
AIYTASGATLYSDSNKG

SEQ ID NO: 290 - protein, 16 aa, Artificial Sequence
  Description of Artificial Sequence: Synthetic peptide
VRKTGSYLFDAQSFTY

SEQ ID NO: 291 - protein, 9 aa, Artificial Sequence
  Description of Artificial Sequence: Synthetic peptide
FTYSSYCMG

SEQ ID NO: 292 - protein, 16 aa, Artificial Sequence
  Description of Artificial Sequence: Synthetic peptide
SIDSDGSTSYTDSVKG

SEQ ID NO: 293 - protein, 21 aa, Artificial Sequence
  Description of Artificial Sequence: Synthetic peptide
DLMSTVVPGFCGFLLSAGMDY

SEQ ID NO: 294 - protein, 9 aa, Artificial Sequence
  Description of Artificial Sequence: Synthetic peptide
YTFNSNCMG

SEQ ID NO: 295 - protein, 17 aa, Artificial Sequence
  Description of Artificial Sequence: Synthetic peptide
TIYTGVGSTYYADSVKG

SEQ ID NO: 296 - protein, 18 aa, Artificial Sequence
  Description of Artificial Sequence: Synthetic peptide
EPLSRVYGGSCPTPTFGY

SEQ ID NO: 297 - protein, 9 aa, Artificial Sequence
  Description of Artificial Sequence: Synthetic peptide
YTYSMYCMG

SEQ ID NO: 298 - protein, 16 aa, Artificial Sequence
  Description of Artificial Sequence: Synthetic peptide
QINSDGSTSYADSVKG

SEQ ID NO: 299 - protein, 23 aa, Artificial Sequence
  Description of Artificial Sequence: Synthetic peptide
DSRVYGGSWYERLCGPYTYEYNY

SEQ ID NO: 300 - protein, 9 aa, Artificial Sequence
  Description of Artificial Sequence: Synthetic peptide
YAYSTYCMG

SEQ ID NO: 301 - protein, 16 aa, Artificial Sequence
  Description of Artificial Sequence: Synthetic peptide
AIDSGGSTSYADSVKG

SEQ ID NO: 302 - protein, 26 aa, Artificial Sequence
  Description of Artificial Sequence: Synthetic peptide
VPPPPDGGSCLFLGPEIKVSKADFRY

SEQ ID NO: 303 - protein, 9 aa, Artificial Sequence
  Description of Artificial Sequence: Synthetic peptide
YLYSIDYMA

SEQ ID NO: 304 - protein, 17 aa, Artificial Sequence
  Description of Artificial Sequence: Synthetic peptide
VIYTASGATFYPDSVKG

SEQ ID NO: 305 - protein, 16 aa, Artificial Sequence
  Description of Artificial Sequence: Synthetic peptide
VRKTDSYLFDAQSFTY

SEQ ID NO: 306 - protein, 9 aa, Artificial Sequence
  Description of Artificial Sequence: Synthetic peptide
YTYSSYCMG

SEQ ID NO: 307 - protein, 16 aa, Artificial Sequence
  Description of Artificial Sequence: Synthetic peptide
VIDSDGSTSYADSVKG

SEQ ID NO: 308 - protein, 18 aa, Artificial Sequence
  Description of Artificial Sequence: Synthetic peptide
DLGHYRPPCGVLYLGMDY

SEQ ID NO: 309 - protein, 9 aa, Artificial Sequence
  Description of Artificial Sequence: Synthetic peptide
YTYSSNCMG

SEQ ID NO: 310 - protein, 17 aa, Artificial Sequence
  Description of Artificial Sequence: Synthetic peptide
TIYTGGGNTYYADSVKG

SEQ ID NO: 311 - protein, 18 aa, Artificial Sequence
  Description of Artificial Sequence: Synthetic peptide
EPLSRVYGGSCPTPTFDY

SEQ ID NO: 312 - protein, 9 aa, Artificial Sequence
  Description of Artificial Sequence: Synthetic peptide
YSYSSNCMG

SEQ ID NO: 313 - protein, 17 aa, Artificial Sequence
  Description of Artificial Sequence: Synthetic peptide
TIHTGGGSTYYADSVKG

SEQ ID NO: 314 - protein, 18 aa, Artificial Sequence
  Description of Artificial Sequence: Synthetic peptide
EPLSRLYGGSCPTPTFGY

SEQ ID NO: 315 - protein, 9 aa, Artificial Sequence
  Description of Artificial Sequence: Synthetic peptide
YTYSSYCMG

SEQ ID NO: 316 - protein, 16 aa, Artificial Sequence
  Description of Artificial Sequence: Synthetic peptide
VIDSDGSTSYADSVKG

SEQ ID NO: 317 - protein, 18 aa, Artificial Sequence
  Description of Artificial Sequence: Synthetic peptide
DLGHYRPPCGVLYLGMDY

SEQ ID NO: 318 - protein, 9 aa, Artificial Sequence
  Description of Artificial Sequence: Synthetic peptide
YTYSGYCMG

SEQ ID NO: 319 - protein, 16 aa, Artificial Sequence
  Description of Artificial Sequence: Synthetic peptide
VIDSDGSTSYADSVKG

SEQ ID NO: 320 - protein, 18 aa, Artificial Sequence
  Description of Artificial Sequence: Synthetic peptide
DLGHYRPPCGVLYLGMDY

SEQ ID NO: 321 - protein, 9 aa, Artificial Sequence
  Description of Artificial Sequence: Synthetic peptide
YTYSNYCMG

SEQ ID NO: 322 - protein, 16 aa, Artificial Sequence
  Description of Artificial Sequence: Synthetic peptide
TIDSDGNTSYADSVKG

SEQ ID NO: 323 - protein, 18 aa, Artificial Sequence
  Description of Artificial Sequence: Synthetic peptide
DLGHYRPPCGAYYYGMDY

SEQ ID NO: 324 - protein, 9 aa, Artificial Sequence
  Description of Artificial Sequence: Synthetic peptide
YSNCSYDMT

SEQ ID NO: 325 - protein, 16 aa, Artificial Sequence
  Description of Artificial Sequence: Synthetic peptide
AIHSDGSTRYADSVKG

SEQ ID NO: 326 - protein, 19 aa, Artificial Sequence
  Description of Artificial Sequence: Synthetic peptide
DPLHCRAHGGSWYSVRANY

SEQ ID NO: 327 - protein, 9 aa, Artificial Sequence
  Description of Artificial Sequence: Synthetic peptide
YTYNSNCMG

SEQ ID NO: 328 - protein, 17 aa, Artificial Sequence
  Description of Artificial Sequence: Synthetic peptide
TIYTGVGSTYYADSVKG

SEQ ID NO: 329 - protein, 18 aa, Artificial Sequence
  Description of Artificial Sequence: Synthetic peptide
EPLSRVYGGSCPTPTFGY

SEQ ID NO: 330 - protein, 9 aa, Artificial Sequence
  Description of Artificial Sequence: Synthetic peptide
FTFDDSDMG

SEQ ID NO: 331 - protein, 16 aa, Artificial Sequence
  Description of Artificial Sequence: Synthetic peptide
TISSDGSTYYADSVKG

SEQ ID NO: 332 - protein, 13 aa, Artificial Sequence
  Description of Artificial Sequence: Synthetic peptide
DFMIAIQAPGAGC

SEQ ID NO: 333 - protein, 9 aa, Artificial Sequence
  Description of Artificial Sequence: Synthetic peptide
FSFSSYPMT

SEQ ID NO: 334 - protein, 17 aa, Artificial Sequence
  Description of Artificial Sequence: Synthetic peptide
TIASDGGSTAYAASVEG

SEQ ID NO: 335 - protein, 8 aa, Artificial Sequence
  Description of Artificial Sequence: Synthetic peptide
GYGDGTPA

SEQ ID NO: 336 - protein, 9 aa, Artificial Sequence
  Description of Artificial Sequence: Synthetic peptide
FTFDDREMN

SEQ ID NO: 337 - protein, 16 aa, Artificial Sequence
  Description of Artificial Sequence: Synthetic peptide
TISSDGSTYYADSVKG

SEQ ID NO: 338 - protein, 13 aa, Artificial Sequence
  Description of Artificial Sequence: Synthetic peptide
DFMIAIQAPGAGC

SEQ ID NO: 339 - protein, 9 aa, Artificial Sequence
  Description of Artificial Sequence: Synthetic peptide
FTFDDSDMG

SEQ ID NO: 340 - protein, 16 aa, Artificial Sequence
  Description of Artificial Sequence: Synthetic peptide
TISSDGNTYYTDSVKG

SEQ ID NO: 341 - protein, 17 aa, Artificial Sequence
  Description of Artificial Sequence: Synthetic peptide
EPRGYYSNYGGRRECNY

SEQ ID NO: 342 - protein, 9 aa, Artificial Sequence
  Description of Artificial Sequence: Synthetic peptide
FSFSSYPMT

SEQ ID NO: 343 - protein, 17 aa, Artificial Sequence
  Description of Artificial Sequence: Synthetic peptide
TIASDGGSTAYAASVEG

SEQ ID NO: 344 - protein, 8 aa, Artificial Sequence
  Description of Artificial Sequence: Synthetic peptide
GYGDGTPA

SEQ ID NO: 345 - protein, 9 aa, Artificial Sequence
  Description of Artificial Sequence: Synthetic peptide
FTFSNAHMS

SEQ ID NO: 346 - protein, 16 aa, Artificial Sequence
  Description of Artificial Sequence: Synthetic peptide
SIYSGGSTWYADSVKG

SEQ ID NO: 347 - protein, 12 aa, Artificial Sequence
  Description of Artificial Sequence: Synthetic peptide
NRLHYYSDDDSL

SEQ ID NO: 348 - protein, 9 aa, Artificial Sequence
  Description of Artificial Sequence: Synthetic peptide
FTFDDREMN

SEQ ID NO: 349 - protein, 16 aa, Artificial Sequence
  Description of Artificial Sequence: Synthetic peptide
TISSDGSTYYADSVKG

SEQ ID NO: 350 - protein, 13 aa, Artificial Sequence
  Description of Artificial Sequence: Synthetic peptide
DFMIAIQAPGAGC

SEQ ID NO: 351 - protein, 9 aa, Artificial Sequence
  Description of Artificial Sequence: Synthetic peptide
YTFSSYCMG

SEQ ID NO: 352 - protein, 15 aa, Artificial Sequence
  Description of Artificial Sequence: Synthetic peptide
ALGGGSTYYADSVKG

SEQ ID NO: 353 - protein, 20 aa, Artificial Sequence
  Description of Artificial Sequence: Synthetic peptide
AWVACLEFGGSWYDLARYKH

SEQ ID NO: 354 - protein, 9 aa, Artificial Sequence
  Description of Artificial Sequence: Synthetic peptide
FTFDDSDMG

SEQ ID NO: 355 - protein, 16 aa, Artificial Sequence
  Description of Artificial Sequence: Synthetic peptide
TISSDGSTYYADSVKG

SEQ ID NO: 356 - protein, 17 aa, Artificial Sequence
  Description of Artificial Sequence: Synthetic peptide
EPRGYYSNYGGRRECNY

SEQ ID NO: 357 - protein, 9 aa, Artificial Sequence
  Description of Artificial Sequence: Synthetic peptide
SIYSSAYIG

SEQ ID NO: 358 - protein, 17 aa, Artificial Sequence
  Description of Artificial Sequence: Synthetic peptide
GIYTRDGSTAYADSVKG

SEQ ID NO: 359 - protein, 18 aa, Artificial Sequence
  Description of Artificial Sequence: Synthetic peptide
GRRTKSYVYIFRPEEYNY

SEQ ID NO: 360 - protein, 9 aa, Artificial Sequence
  Description of Artificial Sequence: Synthetic peptide
FTFSSAHMS

SEQ ID NO: 361 - protein, 16 aa, Artificial Sequence
  Description of Artificial Sequence: Synthetic peptide
SIYSGGGTFYADSVKG

SEQ ID NO: 362 - protein, 12 aa, Artificial Sequence
  Description of Artificial Sequence: Synthetic peptide
NRLHYYSDDDSL

SEQ ID NO: 363 - protein, 9 aa, Artificial Sequence
  Description of Artificial Sequence: Synthetic peptide
FTFSNAHMS

SEQ ID NO: 364 - protein, 16 aa, Artificial Sequence
  Description of Artificial Sequence: Synthetic peptide
SIYSGGSTWYADSVKG

SEQ ID NO: 365 - protein, 12 aa, Artificial Sequence
  Description of Artificial Sequence: Synthetic peptide
NRLHYYSDDDSL

SEQ ID NO: 366 - protein, 9 aa, Artificial Sequence
  Description of Artificial Sequence: Synthetic peptide
FIFDDSDMG

SEQ ID NO: 367 - protein, 16 aa, Artificial Sequence
  Description of Artificial Sequence: Synthetic peptide
TISSDGSTYYADSVKG

SEQ ID NO: 368 - protein, 17 aa, Artificial Sequence
  Description of Artificial Sequence: Synthetic peptide
EPRGYYSNYGGRRECNY

SEQ ID NO: 369 - protein, 9 aa, Artificial Sequence
  Description of Artificial Sequence: Synthetic peptide
FTADDSDMG

SEQ ID NO: 370 - protein, 16 aa, Artificial Sequence
  Description of Artificial Sequence: Synthetic peptide
TISSDGSTYYADSVKG

SEQ ID NO: 371 - protein, 17 aa, Artificial Sequence
  Description of Artificial Sequence: Synthetic peptide
EPRGYYSNYGGRRECNY

SEQ ID NO: 372 - protein, 9 aa, Artificial Sequence
  Description of Artificial Sequence: Synthetic peptide
FTFSSAHMS

SEQ ID NO: 373 - protein, 16 aa, Artificial Sequence
  Description of Artificial Sequence: Synthetic peptide
SIYSGGGTFYADSVKG

SEQ ID NO: 374 - protein, 12 aa, Artificial Sequence
  Description of Artificial Sequence: Synthetic peptide
NRLHYYSDDDSL

SEQ ID NO: 375 - protein, 9 aa, Artificial Sequence
  Description of Artificial Sequence: Synthetic peptide
FTFSNAHMS

SEQ ID NO: 376 - protein, 16 aa, Artificial Sequence
  Description of Artificial Sequence: Synthetic peptide
SIYSGGSTWYADSVKG

SEQ ID NO: 377 - protein, 12 aa, Artificial Sequence
  Description of Artificial Sequence: Synthetic peptide
NRLHYYSDDDSL

SEQ ID NO: 378 - protein, 9 aa, Artificial Sequence
  Description of Artificial Sequence: Synthetic peptide
FTFSNAHMS

SEQ ID NO: 379 - protein, 16 aa, Artificial Sequence
  Description of Artificial Sequence: Synthetic peptide
SIYSGGSTWYADSVKG

SEQ ID NO: 380 - protein, 12 aa, Artificial Sequence
  Description of Artificial Sequence: Synthetic peptide
NRLHYYSDDDSL

SEQ ID NO: 381 - protein, 9 aa, Artificial Sequence
  Description of Artificial Sequence: Synthetic peptide
FTFSSYPMT

SEQ ID NO: 382 - protein, 17 aa, Artificial Sequence
  Description of Artificial Sequence: Synthetic peptide
TIASDGGSTAYAASVEG

SEQ ID NO: 383 - protein, 8 aa, Artificial Sequence
  Description of Artificial Sequence: Synthetic peptide
GYGDGTPA

SEQ ID NO: 384 - protein, 9 aa, Artificial Sequence
  Description of Artificial Sequence: Synthetic peptide
FTFDDREMN

SEQ ID NO: 385 - protein, 16 aa, Artificial Sequence
  Description of Artificial Sequence: Synthetic peptide
TISSDGSTYYADSVKG

SEQ ID NO: 386 - protein, 13 aa, Artificial Sequence
  Description of Artificial Sequence: Synthetic peptide
DFMIAIQAPGAGC

SEQ ID NO: 387 - protein, 9 aa, Artificial Sequence
  Description of Artificial Sequence: Synthetic peptide
FTFDDSDMG

SEQ ID NO: 388 - protein, 16 aa, Artificial Sequence
  Description of Artificial Sequence: Synthetic peptide
TISSDGSTYYADSVKG

SEQ ID NO: 389 - protein, 17 aa, Artificial Sequence
  Description of Artificial Sequence: Synthetic peptide
EPRGYYSNYGGRRECNY

SEQ ID NO: 390 - protein, 6 aa, Artificial Sequence
  Description of Artificial Sequence: Synthetic peptide
YTSCMG

SEQ ID NO: 391 - protein, 17 aa, Artificial Sequence
  Description of Artificial Sequence: Synthetic peptide
TIYTRGRSIYYADSVKG

SEQ ID NO: 392 - protein, 13 aa, Artificial Sequence
  Description of Artificial Sequence: Synthetic peptide
GGYSWSAGCEFNY

SEQ ID NO: 393 - protein, 9 aa, Artificial Sequence
  Description of Artificial Sequence: Synthetic peptide
FSFSSYPMT

SEQ ID NO: 394 - protein, 17 aa, Artificial Sequence
  Description of Artificial Sequence: Synthetic peptide
TIASDGGSTAYAASVEG

SEQ ID NO: 395 - protein, 8 aa, Artificial Sequence
  Description of Artificial Sequence: Synthetic peptide
GYGDGTPA

SEQ ID NO: 396 - protein, 9 aa, Artificial Sequence
  Description of Artificial Sequence: Synthetic peptide
FSFSSYPMT

SEQ ID NO: 397 - protein, 17 aa, Artificial Sequence
  Description of Artificial Sequence: Synthetic peptide
TIASDGGSTAYAASVEG

SEQ ID NO: 398 - protein, 8 aa, Artificial Sequence
  Description of Artificial Sequence: Synthetic peptide
GYGDGTPA

SEQ ID NO: 399 - protein, 7 aa, Artificial Sequence
  Description of Artificial Sequence: Synthetic peptide
YGYNYIG

SEQ ID NO: 400 - protein, 17 aa, Artificial Sequence
  Description of Artificial Sequence: Synthetic peptide
VIYTGGGDTYYADSVKG

SEQ ID NO: 401 - protein, 15 aa, Artificial Sequence
  Description of Artificial Sequence: Synthetic peptide
SVYACLRGGHDEYAH

SEQ ID NO: 402 - protein, 9 aa, Artificial Sequence
  Description of Artificial Sequence: Synthetic peptide
STYANYLMG

SEQ ID NO: 403 - protein, 17 aa, Artificial Sequence
  Description of Artificial Sequence: Synthetic peptide
AIYSGGGSTYYADSVKG

SEQ ID NO: 404 - protein, 25 aa, Artificial Sequence
  Description of Artificial Sequence: Synthetic peptide
ASAVKGDKGDIVVVVTGTQRMEYDY

SEQ ID NO: 405 - protein, 9 aa, Artificial Sequence
  Description of Artificial Sequence: Synthetic peptide
FTFDESVMS

SEQ ID NO: 406 - protein, 16 aa, Artificial Sequence
  Description of Artificial Sequence: Synthetic peptide
IISSDDNTYYDDSVKG

SEQ ID NO: 407 - protein, 24 aa, Artificial Sequence
  Description of Artificial Sequence: Synthetic peptide
RRRRPVYDSDYELRPRPLCGDFGV

SEQ ID NO: 408 - protein, 9 aa, Artificial Sequence
  Description of Artificial Sequence: Synthetic peptide
LPFDEDDMG

SEQ ID NO: 409 - protein, 16 aa, Artificial Sequence
  Description of Artificial Sequence: Synthetic peptide
SISSDGTAYYADSVKG

SEQ ID NO: 410 - protein, 21 aa, Artificial Sequence
  Description of Artificial Sequence: Synthetic peptide
GVHRQFGGSSSCGDAFYGMDY

SEQ ID NO: 411 - protein, 9 aa, Artificial Sequence
  Description of Artificial Sequence: Synthetic peptide
DVYGRNSMA

SEQ ID NO: 412 - protein, 17 aa, Artificial Sequence
  Description of Artificial Sequence: Synthetic peptide
VGYSVVTTTYYADSVKG

SEQ ID NO: 413 - protein, 15 aa, Artificial Sequence
  Description of Artificial Sequence: Synthetic peptide
DGNLWRGLRPSEYTY

SEQ ID NO: 414 - protein, 9 aa, Artificial Sequence
  Description of Artificial Sequence: Synthetic peptide
FPYSRYCMG

SEQ ID NO: 415 - protein, 16 aa, Artificial Sequence
  Description of Artificial Sequence: Synthetic peptide
AIEPDGSTSYADSVKG

SEQ ID NO: 416 - protein, 20 aa, Artificial Sequence
  Description of Artificial Sequence: Synthetic peptide
DERCFYLKDYDLRRPAQYRY

SEQ ID NO: 417 - protein, 9 aa, Artificial Sequence
  Description of Artificial Sequence: Synthetic peptide
FTFDESDMG

SEQ ID NO: 418 - protein, 16 aa, Artificial Sequence
  Description of Artificial Sequence: Synthetic peptide
VITSDDNPYYDDSVKG

SEQ ID NO: 419 - protein, 24 aa, Artificial Sequence
  Description of Artificial Sequence: Synthetic peptide
RSRQPVYSRDYELRPRPLCGDFGV

SEQ ID NO: 420 - protein, 9 aa, Artificial Sequence
  Description of Artificial Sequence: Synthetic peptide
FTFDDFDMG

SEQ ID NO: 421 - protein, 16 aa, Artificial Sequence
  Description of Artificial Sequence: Synthetic peptide
TISDDGSTYYADSVKG

SEQ ID NO: 422 - protein, 18 aa, Artificial Sequence
  Description of Artificial Sequence: Synthetic peptide
EGALGSKTNCGWVGNFGY

SEQ ID NO: 423 - protein, 9 aa, Artificial Sequence
  Description of Artificial Sequence: Synthetic peptide
FTFDDFDMG

SEQ ID NO: 424 - protein, 16 aa, Artificial Sequence
  Description of Artificial Sequence: Synthetic peptide
TISDDGSTYYADSVKG

SEQ ID NO: 425 - protein, 18 aa, Artificial Sequence
  Description of Artificial Sequence: Synthetic peptide
EGALGSKTNCGWVGNFGY

SEQ ID NO: 426 - protein, 9 aa, Artificial Sequence
  Description of Artificial Sequence: Synthetic peptide
FTFDDFDMG

SEQ ID NO: 427 - protein, 16 aa, Artificial Sequence
  Description of Artificial Sequence: Synthetic peptide
TISDDGSTYYADSVKG

SEQ ID NO: 428 - protein, 18 aa, Artificial Sequence
  Description of Artificial Sequence: Synthetic peptide
EGALGSKTNCGWVGNFGY

SEQ ID NO: 429 - protein, 9 aa, Artificial Sequence
  Description of Artificial Sequence: Synthetic peptide
FTFSDRDMG

SEQ ID NO: 430 - protein, 16 aa, Artificial Sequence
  Description of Artificial Sequence: Synthetic peptide
TISDDGSTYYADSVKG

SEQ ID NO: 431 - protein, 18 aa, Artificial Sequence
  Description of Artificial Sequence: Synthetic peptide
EGALGSKTNCGWVGNFGY

SEQ ID NO: 432 - protein, 7 aa, Artificial Sequence
  Description of Artificial Sequence: Synthetic peptide
YGYNYIG

SEQ ID NO: 433 - protein, 17 aa, Artificial Sequence
  Description of Artificial Sequence: Synthetic peptide
VIYIGGGDTYYADSVKG

SEQ ID NO: 434 - protein, 20 aa, Artificial Sequence
  Description of Artificial Sequence: Synthetic peptide
RYCVGSVYACLRGGHDEYAH

SEQ ID NO: 435 - protein, 7 aa, Artificial Sequence
  Description of Artificial Sequence: Synthetic peptide
YGYNYIG

SEQ ID NO: 436 - protein, 17 aa, Artificial Sequence
  Description of Artificial Sequence: Synthetic peptide
VIYTGGGDTYYADSVKG

SEQ ID NO: 437 - protein, 20 aa, Artificial Sequence
  Description of Artificial Sequence: Synthetic peptide
RYCVGSVYACLRGGHDEYAH

SEQ ID NO: 438 - protein, 9 aa, Artificial Sequence
  Description of Artificial Sequence: Synthetic peptide
FTFDDFDMG

SEQ ID NO: 439 - protein, 16 aa, Artificial Sequence
  Description of Artificial Sequence: Synthetic peptide
TISDDGSTYYANSVKG

SEQ ID NO: 440 - protein, 18 aa, Artificial Sequence
  Description of Artificial Sequence: Synthetic peptide
EGALGSKTNCGWVGNFGY

SEQ ID NO: 441 - protein, 9 aa, Artificial Sequence
  Description of Artificial Sequence: Synthetic peptide
FTFDDFDMG

SEQ ID NO: 442 - protein, 16 aa, Artificial Sequence
  Description of Artificial Sequence: Synthetic peptide
TISDDGSTYYADSVKG

SEQ ID NO: 443 - protein, 18 aa, Artificial Sequence
  Description of Artificial Sequence: Synthetic peptide
EGALGSKMNCGWVGNFGY

SEQ ID NO: 444 - protein, 125 aa, Artificial Sequence
  Description of Artificial Sequence: Synthetic polypeptide
QVQLQESGGGSIQAGGSLRLSCAASRYLYSIDYMAWFRQSPGKEREPVAVIYTASGATFYPDSVKGRFTISQDNAKMTVYLQMNSLKSEDTAMYYCAAVRKTDSYLFDAQSFTYWGQGTQVTVSS

SEQ ID NO: 445 - protein, 125 aa, Artificial Sequence
  Description of Artificial Sequence: Synthetic polypeptide
QVQLQESGGGSVQAGGSLRLSCVASRYLYSTNYMAWFRQSPGKEREAVAVIYTASGATLYTDSVKGRFTISQDNAKMTVYLQMNRLKSEDTAMYYCAAVRKTDSYLFDAQSFTYWGQGTQVTVSS

SEQ ID NO: 446 - protein, 125 aa, Artificial Sequence
  Description of Artificial Sequence: Synthetic polypeptide
QVQLQESGGGSIQAGGSLRLSCVASRYLYSTNYMAWFRQSPGKEREAVAVIYTASGATLYTDSVKGRFTISQDNAKMTVYLQMNRLKSEDTAMYYCAAVRKTDSYLFDAQSFTYWGQGTQVTVSS

SEQ ID NO: 447 - protein, 125 aa, Artificial Sequence
  Description of Artificial Sequence: Synthetic polypeptide
QVQLQESGGGSIQAGGSLRLSCAASRYLYSIDYMAWFRQSPGKEREPAAVIYTASGATFYPDSVKGRFTISQDNAKMTVYLQMNSLKSEDTAMYYCAAVRKTDSYLFDAQSFTYWGQGTQVTVSS

SEQ ID NO: 448 - protein, 125 aa, Artificial Sequence
  Description of Artificial Sequence: Synthetic polypeptide
QVQLQESGGGSIQAGGSLRLSCVASKYLYSTNYMAWFRQSPGKEREAVAAIYTASGATLYSDSNKGRFTISQDNAKMTVYLQMNSLKSEDTAMYYCAAVRKTGSYLFDAQSFTYWGQGTQVTVSS

SEQ ID NO: 449 - protein, 129 aa, Artificial Sequence; identical to SEQ ID NO: 8
  Description of Artificial Sequence: Synthetic polypeptide

SEQ ID NO: 450 - protein, 127 aa, Artificial Sequence
  Description of Artificial Sequence: Synthetic polypeptide
QVQLQESGGGSVQAGGSLRLSCAVSGYTFNSNCMGWFRQAPGKEREGVATIYTGVGSTYYADSVKGRFTISQDNAKNTVYLQMNSLKPEDTAMYYCAAEPLSRVYGGSCPTPTFGYWGQGTQVTVSS

SEQ ID NO: 451 - protein, 131 aa, Artificial Sequence; identical to SEQ ID NO: 12
  Description of Artificial Sequence: Synthetic polypeptide

SEQ ID NO: 452 - protein, 134 aa, Artificial Sequence
  Description of Artificial Sequence: Synthetic polypeptide
QVQLQESGGGSVQAGGSLRLSCAVSGYAYSTYCMGWFRQAPGKEREGVAAIDSGGSTSYADSVKGRFTISKDNAKNTLYLRMNSLKPEDTAMYYCAAVPPPPDGGSCLFLGPEIKVSKADFRYWGQGTQVTVSS

SEQ ID NO: 453 - protein, 125 aa, Artificial Sequence; identical to SEQ ID NO: 4
  Description of Artificial Sequence: Synthetic polypeptide

SEQ ID NO: 454 - protein, 126 aa, Artificial Sequence
  Description of Artificial Sequence: Synthetic polypeptide
QVQLQESGGGSVQAGGSLRLSCGASRYTYSSYCMGWFRQAPGKEREGVAVIDSDGSTSYADSVKGRFTISKDNGKNTLYLQMNSLKPEDTAMYYCAADLGHYRPPCGVLYLGMDYWGKGTQVTVSS

SEQ ID NO: 455 - protein, 127 aa, Artificial Sequence; identical to SEQ ID NO: 16
  Description of Artificial Sequence: Synthetic polypeptide

SEQ ID NO: 456 - protein, 127 aa, Artificial Sequence
  Description of Artificial Sequence: Synthetic polypeptide
QVQLQESGGGSVQAGGSLRLSCAVSGYSYSSNCMGWFRQAPGKEREGVATIHTGGGSTYYADSVKGRFTISQDNAKNTVYLQMNSLKPEDTAMYYCAAEPLSRLYGGSCPTPTFGYWGQGTQVTVSS

SEQ ID NO: 457 - protein, 126 aa, Artificial Sequence; identical to SEQ ID NO: 20
  Description of Artificial Sequence: Synthetic polypeptide

SEQ ID NO: 458 - protein, 126 aa, Artificial Sequence
  Description of Artificial Sequence: Synthetic polypeptide
QVQLQESGGGSVQAGGSLRLSCGASGYTYSGYCMGWFRQAPGKEREGVAVIDSDGSTSYADSVKGRFTISKDNGKNTLYLQMNSLKPEDTAMYYCAADLGHYRPPCGVLYLGMDYWGKGTQVTVSS

SEQ ID NO: 459 - protein, 126 aa, Artificial Sequence
  Description of Artificial Sequence: Synthetic polypeptide
QVQLQESGGGSVQAGGSLRLACAASRYTYSNYCMGWFRQAPGKEREGVATIDSDGNTSYADSVKGRFTISRDNAKNTLYLQMNSLKPGDTAMYYCAADLGHYRPPCGAYYYGMDYWGKGTQVTVSS

SEQ ID NO: 460 - protein, 127 aa, Artificial Sequence; identical to SEQ ID NO: 24
  Description of Artificial Sequence: Synthetic polypeptide

SEQ ID NO: 461 - protein, 127 aa, Artificial Sequence
  Description of Artificial Sequence: Synthetic polypeptide
QVQLQESGGGSVQAGGSLRLSCAVSGYTYNSNCMGWFRQAPGKEREGVATIYTGVGSTYYADSVKGRFTISQDNAKNTVYLQMNSLKPEDTAMYYCAAEPLSRVYGGSCPTPTFGYWGQGTQVTVSS

SEQ ID NO: 462 - protein, 121 aa, Artificial Sequence
  Description of Artificial Sequence: Synthetic polypeptide
QVQLQESGGGSVQAGGSLRLSCAASGFTFDDSDMGWYRQAPGNECDLVSTISSDGSTYYADSVKGRFTISQDNAKNTVYLQMDSVKPEDTAVYYCAADFMIAIQAPGAGCWGQGTQVTVSS

SEQ ID NO: 463 - protein, 117 aa, Artificial Sequence
  Description of Artificial Sequence: Synthetic polypeptide
QVQLQESGGGSVPAGGSLKLSCAASGFSFSSYPMTWARQAPGKGLEWVSTIASDGGSTAYAASVEGRFTISRDNAKSTLYLQLNSLKTEDTAMYYCTKGYGDGTPAPGQGTQVTVSS

SEQ ID NO: 464 - protein, 121 aa, Artificial Sequence
  Description of Artificial Sequence: Synthetic polypeptide
QVQLQESGGGSVQTGGSLRLSCTASGFTFDDREMNWYRQAPGNECELVSTISSDGSTYYADSVKGRFTISQDNAKNTVYLQMDSVKPEDTAVYYCAADFMIAIQAPGAGCWGQGTQVTVSS

SEQ ID NO: 465 - protein, 125 aa, Artificial Sequence
  Description of Artificial Sequence: Synthetic polypeptide
QVQLQESGGGSVQAGGSLRLSCTASGFTFDDSDMGWYRQAPGNECELVSTISSDGNTYYTDSVKGRFTISQDNAKNTVYLQMNSLGPEDTAVYYCAAEPRGYYSNYGGRRECNYWGQGTQVTVSS

SEQ ID NO: 466 - protein, 117 aa, Artificial Sequence
  Description of Artificial Sequence: Synthetic polypeptide
QVQLQESGGGSVQAGGSLRLSCAASGFSFSSYPMTWARQAPGKGLEWVSTIASDGGSTAYAASVEGRFTISRDNAKSTLYLQLNSLKTEDTAMYYCTKGYGDGTPAPGQGTQVTVSS

SEQ ID NO: 467 - protein, 120 aa, Artificial Sequence
  Description of Artificial Sequence: Synthetic polypeptide
QVQLQESGGGAVQAGGSLRLSCAASGFTFSNAHMSWVRQAPGKGREWISSIYSGGSTWYADSVKGRFTISRDNSKNTLYLQLNSLKTEDTAMYYCAENRLHYYSDDDSLRGQGTQVTVSS

SEQ ID NO: 468 - protein, 121 aa, Artificial Sequence
  Description of Artificial Sequence: Synthetic polypeptide
QVQLQESGGGLVQPGGSLRLSCAASGFTFDDREMNWYRQAPGNECELVSTISSDGSTYYADSVKGRFTISQDNAKNTVYLQMDSVKPEDTAVYYCAADFMIAIQAPGAGCWGQGTQVTVSS

SEQ ID NO: 469 - protein, 127 aa, Artificial Sequence; identical to SEQ ID NO: 48
  Description of Artificial Sequence: Synthetic polypeptide

SEQ ID NO: 470 - protein, 124 aa, Artificial Sequence
  Description of Artificial Sequence: Synthetic polypeptide
QVQLQESGGGSVQAGGSLRLSCTASGFTFDDSDMGWYRQAPGGECELVTISSDGSTYYADSVKGRFTISQDNAKNTVYLQMNSLKPEDTAVYYCAAEPRGYYSNYGGRRECNYWGQGTQVTVSS

SEQ ID NO: 471 - protein, 127 aa, Artificial Sequence
  Description of Artificial Sequence: Synthetic polypeptide
QVQLQESGGGSVQAGGSLRLSCAASGSIYSSAYIGWFRQAPGKKREGVAGIYTRDGSTAYADSVKGRFTISQDSAKKTVYLQMNSLKPEDTAMYYCAAGRRTKSYVYIFRPEEYNYWGQGTQVTVSS

SEQ ID NO: 472 - protein, 120 aa, Artificial Sequence
  Description of Artificial Sequence: Synthetic polypeptide
QVQLQESGGGSVQAGGSLRLSCAASGFTFSSAHMSWVRQAPGKGREWIASIYSGGGTFYADSVKGRFTISRDNAKNTLYLQLNSLKTEDTAMYYCATNRLHYYSDDDSLRGQGTQVTVSS

SEQ ID NO: 473 - protein, 120 aa, Artificial Sequence
  Description of Artificial Sequence: Synthetic polypeptide
QVQLQESGGGSVQAGGSLRLSCAASGFTFSNAHMSWVRQAPGKGREWISSIYSGGSTWYADSVKGRFTISRDNSKNTLYLQLNSLKTEDTAMYYCAENRLHYYSDDDSLRGQGTQVTVSS

SEQ ID NO: 474 - protein, 125 aa, Artificial Sequence
  Description of Artificial Sequence: Synthetic polypeptide
QVQLQESGGGSVQAGGSLRLSCTASRFIFDDSDMGWYRQAPGNECELVSTISSDGSTYYADSVKGRFTISRDNAKNTVYLQMNSLKPEDTAVYYCAAEPRGYYSNYGGRRECNYWGQGTQVTVSS

SEQ ID NO: 475 - protein, 124 aa, Artificial Sequence
  Description of Artificial Sequence: Synthetic polypeptide
QVQLQESGGGSVQAGGSLKLSCTVSGFTADDSDMGWYRQGPGNECELVTISSDGSTYYADSVKGRFTISQDNAKNTVYLQMNSLKPEDTAVYYCAAEPRGYYSNYGGRRECNYWGQGTQVTVSS

SEQ ID NO: 476 - protein, 120 aa, Artificial Sequence; identical to SEQ ID NO: 32
  Description of Artificial Sequence: Synthetic polypeptide

SEQ ID NO: 477 - protein, 120 aa, Artificial Sequence
  Description of Artificial Sequence: Synthetic polypeptide
QVQLQESGGGLVQPGGSLRLSCVASGFTFSNAHMSWVRQAPGKGREWISSIYSGGSTWYADSVKGRFTISRDNSKNTLYLQLNSLKTEDTAMYYCAENRLHYYSDDDSLRGQGTQVTVSS

SEQ ID NO: 478 - protein, 120 aa, Artificial Sequence
  Description of Artificial Sequence: Synthetic polypeptide
QVQLQESGGGLVQPGGSLRLSCAASGFTFSNAHMSWVRQAPGKGREWISSIYSGGSTWYADSVKGRFTISRDNSKNTLYLQLNSLKTEDTAMYYCAENRLHYYSDDDSLRGQGTQVTVSS

SEQ ID NO: 479 - protein, 117 aa, Artificial Sequence
  Description of Artificial Sequence: Synthetic polypeptide
QVQLQESGGGLVQPGGSLRLSCAASGFTFSSYPMTWARQAPGKGLEWVSTIASDGGSTAYAASVEGRFTISRDNAKSTLYLQLNSLKTEDTAMYYCTKGYGDGTPAPGQGTQVTVSS

SEQ ID NO: 480 - protein, 121 aa, Artificial Sequence; identical to SEQ ID NO: 36
  Description of Artificial Sequence: Synthetic polypeptide

SEQ ID NO: 481 - protein, 125 aa, Artificial Sequence; identical to SEQ ID NO: 44
  Description of Artificial Sequence: Synthetic polypeptide

SEQ ID NO: 482 - protein, 119 aa, Artificial Sequence; identical to SEQ ID NO: 40
  Description of Artificial Sequence: Synthetic polypeptide

SEQ ID NO: 483 - protein, 117 aa, Artificial Sequence; identical to SEQ ID NO: 28
  Description of Artificial Sequence: Synthetic polypeptide

SEQ ID NO: 484 - protein, 117 aa, Artificial Sequence
  Description of Artificial Sequence: Synthetic polypeptide
QVQLQESGGGLVQPGGSLRLSCAASGFSFSSYPMTWARQAPGKGLEWVSTIASDGGSTAYAASVEGRFTISRDNAKSTLYLQLNSLKTEDTAMYYCTKGYGDGTPAPGQGTQVTVSS

SEQ ID NO: 485 - protein, 127 aa, Artificial Sequence
  Description of Artificial Sequence: Synthetic polypeptide
QVQLQESGGGSVLAGGSLRLSCVASGYGYNYIGWFRQTPGKEREGVAVIYTGGGDTYYADSVKGRFTASRDNAKSTLYLQMNSLEPEDTAMYYGVARYCVGSVYACLRGGHDEYAHWGQGTQVTVSS

SEQ ID NO: 486 - protein, 134 aa, Artificial Sequence
  Description of Artificial Sequence: Synthetic polypeptide
QVQLQESGGGSVQPGGSLRLSCAASGSTYANYLMGWFRQAPGKEREGVAAIYSGGGSTYYADSVKGRFTISQDNAKNTLYLQMNSLKPEDTAMYYCAAASAVKGDKGDIVVVVTGTQRMEYDYWGHGTQVTVSS

SEQ ID NO: 487 - protein, 132 aa, Artificial Sequence
  Description of Artificial Sequence: Synthetic polypeptide
QVQLQESGGGSVQAGASLRLSCSVSGFTFDESVMSWLRQGPGNECDAVAIISSDDNTYYDDSVKGRFTISEDNAKNMVYLQMNSLKPEDTAVYYCAARRRRPVYDSDYELRPRPLCGDFGVWGQGTQVTVSS

SEQ ID NO: 488 - protein, 129 aa, Artificial Sequence
  Description of Artificial Sequence: Synthetic polypeptide
QVQLQESGGGSVQAGGSLRLSCIGSGLPFDEDDMGWYRQAPGNECELVSSISSDGTAYYADSVKGRFTISRDNAKNTVLLQMNSLKPEDTAVYYCAAGVHRQFGGSSSCGDAFYGMDYWGKGTQVTVSS

SEQ ID NO: 489 - protein, 124 aa, Artificial Sequence
  Description of Artificial Sequence: Synthetic polypeptide
QVQLQESGGGSVQAGGSLRLSCVASGDVYGRNSMAWFRQAPGKEREGVAVGYSVVTTTYYADSVKGRFTISEDNDKNTVYLEMNSLKPEDTAMYYCAADGNLWRGLRPSEYTYWGQGTQVTVSS

SEQ ID NO: 490 - protein, 128 aa, Artificial Sequence
  Description of Artificial Sequence: Synthetic polypeptide
QVQLQESGGGSVQAGGSLRLSCATSGFPYSRYCMGWFRQAPGKEREGVAAIEPDGSTSYADSVKGRFTISQDNAVNTLYLQMNNLKPEDTAMYYCAADERCFYLKDYDLRRPAQYRYWGQGTQVTVSS

SEQ ID NO: 491 - protein, 132 aa, Artificial Sequence
  Description of Artificial Sequence: Synthetic polypeptide
QVQLQESGGGLVQPGGSLRLSCTVSGFTFDESDMGWLRQNPGNECGVVSVITSDDNPYYDDSVKGRFTISEDNAKNMVYLQMNSLKPEDTGVYYCATRSRQPVYSRDYELRPRPLCGDFGVWGQGTQVTVSS

SEQ ID NO: 492 - protein, 126 aa, Artificial Sequence
  Description of Artificial Sequence: Synthetic polypeptide
QVQLQESGGGSVQAGGSLRLSCTASGFTFDDFDMGWYRQAPGNECELVSTISDDGSTYYADSVKGRSSISRDNAKNTVYLQMNRLKPEDTGVYYCAAEGALGSKTNCGWVGNFGYWGQGTQVTVSS

SEQ ID NO: 493 - protein, 126 aa, Artificial Sequence
  Description of Artificial Sequence: Synthetic polypeptide
QVQLQESGGGSVQAGGSLRLSCAASGFTFDDFDMGWYRQAPGNECELVSTISDDGSTYYADSVKGRSSISRDNAKNTVYLQMNSLKPEDTAVYYCAAEGALGSKTNCGWVGNFGYWGQGTQVTVSS

SEQ ID NO: 494 - protein, 126 aa, Artificial Sequence
  Description of Artificial Sequence: Synthetic polypeptide
QVQLQESGGGLVQPGGSLRLSCAASGFTFDDFDMGWYRQAPGNECELVSTISDDGSTYYADSVKGRSSISRDNAKSTVYLQMNRLKPEDTGVYYCAAEGALGSKTNCGWVGNFGYWGQGTQVTVSS

SEQ ID NO: 495 - protein, 126 aa, Artificial Sequence
  Description of Artificial Sequence: Synthetic polypeptide
QVQLQESGGGLVQPGGSLKLSCAASGFTFSDRDMGWYRQAPGNECERVSTISDDGSTYYADSVKGRSSISRDNAKNTVYLQMNSLKPEDTAVYYCAAEGALGSKTNCGWVGNFGYWGQGTQVTVSS

SEQ ID NO: 496 - protein, 127 aa, Artificial Sequence
  Description of Artificial Sequence: Synthetic polypeptide
QVQLQESGGGSVLAGGSLRLSCVASGYGYNYIGWFRQTPGKEREGVAVIYIGGGDTYYADSVKGRFTASRDNAKSTLYLQMNSLEPEDTAMYYCVARYCVGSVYACLRGGHDEYAHWGQGTQVTVSS

SEQ ID NO: 497 - protein, 127 aa, Artificial Sequence
  Description of Artificial Sequence: Synthetic polypeptide
QVQLQESGGGSVLAGGSLRLSCVASGYGYNYIGWFRQTPGKEREGVAVIYTGGGDTYYADSVKGRFTASRDNAKSTLYLQMNSLEPEDTAMYYCVARYCVGSVYACLRGGHDEYAHWGQGTQVTVSS

SEQ ID NO: 498 - protein, 126 aa, Artificial Sequence
  Description of Artificial Sequence: Synthetic polypeptide
QVQLQESGGGSVQAGGSLRLSCAASGFTFDDFDMGWYRQAPGNECELVSTISDDGSTYYANSVKGRSSISRDNAKNMVYLQMNSLKPEDTAVYYCAAEGALGSKTNCGWVGNFGYWGQGTQVTVSS

SEQ ID NO: 499 - protein, 126 aa, Artificial Sequence
  Description of Artificial Sequence: Synthetic polypeptide
QVQLQESGGGSVQAGGSLRLSCTASGFTFDDFDMGWYRQAPGNECELVSTISDDGSTYYADSVKGRSSISRDNAKNTVYLQMNRLKPEDTGVYYCAAEGALGSKMNCGWVGNFGYWGQGTQVTVSS

SEQ ID NO: 500 - DNA, 375 bp, Artificial Sequence
  Description of Artificial Sequence: Synthetic polynucleotide
caggttcagcttcaggagtccggtggaggctccatccaggccgggggctctctccgcctgtcttgcgccgcttccagatacctctacagtatcgactacatggcttggtttcgtcagagcccaggaaaagagcgggaacccgtggcagtaatctacactgcctcaggtgccacattttaccccgactctgtcaagggcaggttcaccatctctcaggataatgccaagatgacagtgtacttgcagatgaactccctgaaatctgaggataccgctatgtattactgtgccgcagtgcgcaagaccgattcttacctgttcgacgctcagagttttacctactggggccagggcactcaggtcaccgtcagcagc

SEQ ID NO: 501 - DNA, 375 bp, Artificial Sequence
  Description of Artificial Sequence: Synthetic polynucleotide
caggtgcagttgcaggagtccggcgggggttccgtgcaagcaggcggatctctgcgcctgtcctgcgtggcctctcgttatttgtatagcaccaactacatggcttggttccgtcagtccccaggcaaagagcgcgaagccgtagccgtaatctatacggcctctggggcaacactctataccgactcagtgaagggacgcttcacgatttcccaagacaatgcaaagatgaccgtgtacttgcagatgaaccgcctgaagagcgaggacacggctatgtattactgcgcagccgtgcgcaagaccgactcctacttgtttgacgctcagtccttcacttattggggccagggtacacaggtcaccgtgagcagt

SEQ ID NO: 502 - DNA, 375 bp, Artificial Sequence
  Description of Artificial Sequence: Synthetic polynucleotide
caagtacagctccaggagagcggcggtggatctatccaagcagggggtagccttaggttgtcctgtgtggcgtccagatacctgtatagcacgaactacatggcatggttcagacagtccccaggcaaggaacgcgaggcagtcgccgttatttacactgcatctggggccaccctctatacggacagcgtgaagggaaggtttacaatctcccaggacaacgcgaagatgaccgtgtaccttcagatgaaccgcctgaagtccgaggacaccgccatgtattactgtgcagcggtgcgcaagaccgacagctatctgttcgacgcgcagtcattcacttattggggccaaggaacccaagtgaccgtcagctca

SEQ ID NO: 503 - DNA, 375 bp, Artificial Sequence
  Description of Artificial Sequence: Synthetic polynucleotide
caggtgcagctccaagagtccgggggaggctctatccaggcgggaggcagtctgcgcttgtcctgcgccgcaagtcgttatctgtactccattgattacatggcatggttccgccagtccccaggtaaggaacgtgaacctgccgctgtgatctacaccgcttctggagcaaccttttatcctgatagcgttaagggtcgcttcaccatctctcaggataacgccaaaatgacagtgtacctccagatgaacagcctgaagtctgaggacactgccatgtactattgtgcggctgtgcgcaagaccgactcctatctgtttgatgcacagagctttacctattggggtcagggcacccaggtgactgtgtctagc

SEQ ID NO: 504 - DNA, 375 bp, Artificial Sequence
  Description of Artificial Sequence: Synthetic polynucleotide
caggtccagttgcaggagtccggtggaggttccatccaggcgggtgggtcccttcgtctctcctgcgtggcctctaagtacctgtattcaaccaactacatggcatggttcagacagtctcccggcaaagagcgtgaggcagtggccgcgatctatacagcttctggggccaccctgtactctgattccaataagggaaggttcactatctcacaggataacgccaaaatgaccgtctaccttcagatgaacagcctcaagtctgaagacacggcaatgtattactgtgcagccgtgcgcaaaactgggagctacctgtttgacgctcagtctttcacttattggggccagggtacgcaggtgacagtctcttct

SEQ ID NO: 505 - DNA, 387 bp, Artificial Sequence
  Description of Artificial Sequence: Synthetic polynucleotide
caggtgcaactccaggagagcggaggcggttctgttcaggcaggaggttccctgagactgtcctgtgccgcgtctcgctttacgtattcatcctactgcatgggatggttcagacaagcgccggggaaagaaagggaaggcgtggcctccattgactccgacggctcaacttcatacactgatagcgtgaaaggccggttcaccatctctaaggacaacgcgaagaacaccctgtatctccagatgaacagcctcaagcctgaggatactgccatgtactattgcgcactcgacctgatgtctactgtggtcccaggcttctgcgggttcctgctctctgctggcatggactactgggggaagggcactcaggtaacggttagctcc

SEQ ID NO: 506 - DNA, 381 bp, Artificial Sequence
  Description of Artificial Sequence: Synthetic polynucleotide
caggtgcagcttcaggaatctggcgggggctccgtgcaggccgggggctccctcagactttcctgtgccgtctccggttacacatttaacagtaactgtatgggctggttccgccaggcaccaggcaaggagagggaaggtgtggccacaatctatactggtgttgggagtacgtactatgctgattccgtgaaaggtcgcttcacaatttcccaggacaacgcgaagaacactgtgtacttgcagatgaatagcctgaagcctgaagataccgcaatgtattactgcgctgccgagccactctcccgcgtatatggtggaagttgccccacccccactttcggttactggggccagggcactcaagtgaccgtgtcctct

SEQ ID NO: 507 - DNA, 393 bp, Artificial Sequence
  Description of Artificial Sequence: Synthetic polynucleotide
caggttcagcttcaggagtctgggggcggttcagtgcaggctggcggttctctccgcctgtcctgcgctgccagcggctatacttacagcatgtactgcatgggctggttccggcaagcccccggcaaagagcgtgagggcgtcgctcaaatcaacagcgacgggtcaaccagctacgccgattctgtcaagggcagatttactatcagcaaggacaacgccaaaaacacactgtacctccagatgaactctttgaagcctgaggacaccgcgatgtattactgcgccgctgacagccgcgtgtacggtggcagctggtatgagaggctgtgcggcccgtacacctacgagtacaactattggggacagggcacgcaggtgacagttagctcc

SEQ ID NO: 508 - DNA, 402 bp, Artificial Sequence
  Description of Artificial Sequence: Synthetic polynucleotide
caggtgcaactgcaagagagtggcggaggctccgtccaggctggaggttccctgcggctgtcttgcgccgtcagcggctacgcatattccacttactgtatgggttggttccgccaggcccctggaaaggaacgcgagggtgttgccgctattgatagcggaggctccacatcctatgcggactccgtgaaaggtcgtttcaccatctccaaggataacgccaagaacactctgtacctgcgcatgaactctctgaagcctgaggacactgccatgtattactgcgccgctgtgccccctccacccgacgggggctcttgtctgtttcttggcccggagatcaaggtgtccaaggctgatttccgttattggggccagggaactcaagtcaccgtgtcttcc

SEQ ID NO: 509 - DNA, 375 bp, Artificial Sequence
  Description of Artificial Sequence: Synthetic polynucleotide
caggtccagctccaggagtccggtggaggctccgttcaggccggtggcagcttgcgtctgagctgcgcggcttcaagatacctgtactccattgattacatggcatggttccgtcagtctcctggcaaggagcgcgagcccgtcgctgtgatctataccgccagcggagccacgttctaccctgattccgtcaagggccgcttcaccattagccaagacaacgctaagatgacggtgtacctccaaatgaatagcctgaaaagcgaggacacagcgatgtattactgcgccgctgttaggaaaactgatagttacctgttcgatgcacagtctttcacttactgggggcagggcacccaagttaccgtctcctct

SEQ ID NO: 510 - DNA, 378 bp, Artificial Sequence
  Description of Artificial Sequence: Synthetic polynucleotide
caggtgcagctccaggaatctggagggggcagtgtgcaggccgggggctccctgcgcttgagctgtggagccagccgctacacgtattccagttactgtatgggctggttcagacaagctccgggtaaggagagagagggagttgccgtaattgattctgacgggtccactagctatgcggattcagtcaagggccggttcaccatcagcaaggacaatggtaagaacacactgtacctgcaaatgaacagcctgaagcccgaggacaccgccatgtactattgtgccgctgatctcggacattaccgccctccctgcggtgtgctctatctcgggatggactattggggtaagggcacccaggtgaccgtgtcctct

SEQ ID NO: 511 - DNA, 381 bp, Artificial Sequence
  Description of Artificial Sequence: Synthetic polynucleotide
caggtgcagctccaggaaagcggcgggggtagcgttcaagcaggtgggtccctgcgcttgagctgtactgtgtccggctacacctactcaagcaactgcatgggatggttccgtcaggcccctggcaaggaacgcgaaggcgtggctactatctacaccggcggtggcaacacttattacgccgactccgttaaggggcgtttcactatcagccaagacaacgccaagaacaccgtgtatctgcaaatgaataacctgaagcctgaagacaccgccatgtattactgtgctgccgagcccctttcccgcgtttacggcggttcttgtcctacccctacctttgactactggggtcagggaacacaggtgacagtgtccagt

SEQ ID NO: 512 - DNA, 381 bp, Artificial Sequence
  Description of Artificial Sequence: Synthetic polynucleotide
caagtccaactccaggaatctgggggaggctccgtacaggctggcggttcccttcgtctgtcctgtgctgtgtcagggtactcctactccagtaactgtatgggctggttccggcaagcccccggaaaggagcgcgagggcgtggctaccatccacacagggggcggttccacatattacgccgatagtgtcaagggccgcttcaccattagtcaggacaacgccaagaataccgtttaccttcaaatgaactctttgaaacctgaggacactgcgatgtattactgtgcggcagagcctttgtcccgcctgtacgggggatcttgtccgaccccgactttcgggtactggggacagggcacccaggtgacagtgtcctcc

SEQ ID NO: 513 - DNA, 378 bp, Artificial Sequence
  Description of Artificial Sequence: Synthetic polynucleotide
caggtgcagttgcaggaaagcgggggtggcagcgtccaagccggtggcagcctgcgtctgtcctgcggtgcctccggctatacttactccagctattgcatgggttggttccgccaagtgccaggaaaggagcgtgagggggtggctgtaattgattcagatgggtcaacaagctacgctgacagcgttaaaggtcgcttcaccatcagtaaggacaacggcaagaacaccctctacctgcaaatgaactccctgaagccggaggataccgcaatgtattactgtgccgctgacttgggacactaccgccctccgtgcggtgtgctttatctgggcatggattactggggtaagggaacccaagtgacggtgtcttct

SEQ ID NO: 514 - DNA, 378 bp, Artificial Sequence
  Description of Artificial Sequence: Synthetic polynucleotide
caggtacaactccaggagtctggcggtgggtccgtgcaggcaggtggcagccttcgcctctcctgcggggcctccgggtacacctatagtggctactgcatggggtggttcaggcaagcccccggtaaggaacgtgagggagttgctgtgattgattcagatgggtccacgagttacgctgactccgtgaaaggtaggttcacaatctccaaagataatggcaagaacaccctctaccttcagatgaatagcctgaagccagaagacaccgccatgtattactgtgctgccgacctgggacactatcgccctccgtgcggggtcctgtacttgggcatggactattggggcaaggggacccaggtgactgtgtcctct

SEQ ID NO: 515 - DNA, 378 bp, Artificial Sequence
  Description of Artificial Sequence: Synthetic polynucleotide
caggtgcagttgcaggaatccggtggaggctctgttcaggccgggggctctctccgcctggcctgcgcagcctccaggtatacttacagcaactactgcatggggtggtttcgccaggctccgggcaaagagcgtgagggagtggctactattgattccgatggaaacaccagctacgccgatagcgtgaagggcagatttactatcagcagagataacgctaaaaacacgttgtacctccagatgaactcactcaagccgggggacacagctatgtattactgcgcagccgatctgggtcactaccgcccgccctgcggcgcatattactatggcatggactactggggcaagggcacccaggtgaccgtgtccagt

SEQ ID NO: 516 - DNA, 381 bp, Artificial Sequence
  Description of Artificial Sequence: Synthetic polynucleotide
caggtgcagctccaagagtctggcgggggttccgtgcaagccggtggctcactcaggttgagttgcgcagccagcggctatagcaactgttcctatgacatgacttggtatcgccaggcccctggcaaagagcgtgagttcgtgtcagctattcactccgacggctccactcgttatgcggactctgtgaagggccggtttttcatctcccaggacaacgctaaaaacactgtctatttgcagatgaactctctgaaacccgaagataccgccatgtactattgcaaaaccgatcctctgcattgtcgcgcccacggcgggagttggtactctgtgcgggccaactattggggccagggcacccaggtcaccgtgtcctca

SEQ ID NO: 517 - DNA, 381 bp, Artificial Sequence
  Description of Artificial Sequence: Synthetic polynucleotide
caggtacaactccaggagtctggcggtggcagcgtgcaggcaggcggaagcctgaggctgtcctgcgctgtatctggctacacttataattccaactgcatgggttggtttcggcaggctccaggtaaggagcgcgagggcgtcgccaccatttatacaggtgttggcagcacatattacgccgacagcgtgaagggaaggttcaccatctcccaagacaatgcgaaaaacacagtgtatctccagatgaatagcctgaagcccgaggacacggctatgtattactgcgctgccgagccactgagcagagtgtatgggggcagctgtcctacacccactttcggctattggggtcaaggcacccaggttacagtcagctcc

SEQ ID NO: 518 - DNA, 363 bp, Artificial Sequence
  Description of Artificial Sequence: Synthetic polynucleotide
caggtccagctccaggagagcgggggcggttctgtgcaagccggaggctcattgagactctcatgcgctgcaagtggttttaccttcgatgacagcgatatgggatggtatcgtcaggctccgggcaatgagtgtgatctggtctccactatctcctctgatggttccacatactatgctgactctgtcaaggggcgctttaccatctcccaagataatgccaagaacaccgtgtaccttcagatggattcagttaagcccgaggacacagccgtctattactgcgctgcggattttatgattgccatccaagctcccggagcgggatgctggggccagggaacccaggtcactgtgagcagt

SEQ ID NO: 519 - DNA, 351 bp, Artificial Sequence
  Description of Artificial Sequence: Synthetic polynucleotide
caggtgcagttgcaggagtccggcgggggttctgtgccagcgggtgggagcctcaagctctcctgtgccgcttccggcttctcattctcctcttaccctatgacctgggcacgccaagcgcccggcaagggactggaatgggtgtccaccattgcttccgatggcggtagtacagcctacgccgcgtcagtggagggtcggttcacgatcagccgggacaacgcgaagagcacactctacctccagctgaactctctgaagaccgaggacaccgccatgtactattgcacaaagggctacggcgacggcaccccggcacccggccagggcacccaggtgacagtctcttcc

SEQ ID NO: 520 - DNA, 363 bp, Artificial Sequence
  Description of Artificial Sequence: Synthetic polynucleotide
caggtgcagttgcaggaaagtggtggagggagtgtgcagactgggggctctctccgcctcagctgcacagcctctggatttaccttcgatgatcgcgagatgaactggtatcgccaggctccgggaaacgagtgcgaactggtgtctacaatcagttctgacgggtccacctattacgctgatagtgtcaagggccgcttcactatctctcaggacaacgcgaagaacaccgtttacttgcagatggatagcgtgaagcctgaagatacagcggtgtattactgcgctgccgactttatgattgccatccaggcaccgggggcggggtgttggggacagggaactcaggtgactgtgtcctcc

SEQ ID NO: 521 - DNA, 375 bp, Artificial Sequence
  Description of Artificial Sequence: Synthetic polynucleotide
caggttcaactccaagagagtggtggcggaagcgtgcaggcgggcggttctctgcgtctgagttgcactgccagcggatttaccttcgacgattccgacatgggatggtacagacaggcccctggtaacgagtgcgaactcgtgagtactatcagctccgacggcaacacctattacaccgattctgtgaagggcaggttcaccatctcccaggacaacgctaagaacactgtgtacctgcaaatgaatagcctgggacccgaggacacagcggtctattactgcgcggcagagccgcgcggctattacagcaactacggcggtagacgcgagtgcaactactgggggcaggggacgcaagtgactgtctcctcc

SEQ ID NO: 522 - DNA, 351 bp, Artificial Sequence
  Description of Artificial Sequence: Synthetic polynucleotide
caagtgcagcttcaggagtccgggggtggcagcgtccaggctgggggcagcttgcgcctgtcttgcgctgcgtctgggttcagctttagctcctaccctatgacctgggctagacaggcccccggcaaggggctggagtgggtgagtacaatcgcctccgacggaggtagtacggcctacgcagcgtccgtcgagggtcgcttcaccatcagccgggataacgctaagtccaccctgtaccttcagctcaattctctcaaaacggaggataccgccatgtactattgcaccaagggatatggcgacggcaccccagctcctggacagggcacacaggtcaccgttagctcc

SEQ ID NO: 523 - DNA, 360 bp, Artificial Sequence
  Description of Artificial Sequence: Synthetic polynucleotide
caggtccagcttcaggagtctggcgggggcgcagtacaggcagggggttctctgcgtctgtcctgcgccgcgtccggctttactttcagcaacgcacacatgagttgggtgcgccaagcgcccggcaagggccgggaatggatcagtagcatctacagtggaggcagcacatggtacgccgactctgttaagggtcgttttacgatctctcgtgacaactccaagaacactttgtacctccagctcaattctctcaagaccgaggacaccgcgatgtactattgtgccgagaacaggctgcactactattccgacgatgactctctcaggggccagggaactcaagttaccgtgtccagc

SEQ ID NO: 524 - DNA, 363 bp, Artificial Sequence
  Description of Artificial Sequence: Synthetic polynucleotide
caagtgcagctccaagagagtggtggcgggctggttcagccagggggcagcttgagactctcctgcgcagcttcaggctttaccttcgatgaccgtgagatgaactggtatcgtcaggccccaggcaacgagtgtgagctggttagcacgatttcttccgacggttccacctattacgccgactctgtgaagggacgtttcactatctcccaggacaatgccaagaacaccgtgtacctccagatggacagcgtgaagccggaggatactgctgtgtattactgcgctgccgactttatgatcgccatccaggcccctggcgcgggttgctggggccagggcactcaggtgaccgtgtcttcc

SEQ ID NO: 525 - DNA, 381 bp, Artificial Sequence
  Description of Artificial Sequence: Synthetic polynucleotide
caagtgcaactgcaagagtccggcggtggatctgtgcaggccggaggcagcctgcggctgagctgtgtagcttccgggtatacctttagctcatactgtatgggctggtttcgtcaggcccccggtaaggagcgcgagggcgtggccgctcttggtggaggctccacctattacgccgattccgtgaagggcaggtttactatctcccaggacaacgcgaagaatacgctctatctccagatgaatagcctgaagcccgaggatacagctatgtattactgtgctgccgcttgggtagcctgcctggagttcggtggctcctggtacgatctggcacggtacaaacattgggggcagggcacccaggtcaccgtgtctagc

SEQ ID NO: 526 - DNA, 372 bp, Artificial Sequence
  Description of Artificial Sequence: Synthetic polynucleotide
caggtccagttgcaggaatctgggggcggttccgtacaagcaggtggctcccttcggttgagctgtaccgcatccggctttactttcgacgatagcgatatgggctggtatcgtcaggccccagggggcgagtgcgagctggttacaatctcctctgacggcagtacctattacgcagactccgtcaagggcaggttcactatcagtcaggacaatgcaaagaacactgtgtatctccagatgaactctctgaagccagaagatactgccgtgtattactgcgctgcggaaccgagaggctattactctaattatggcgggcgtcgggagtgtaattattggggacagggaacccaggtgaccgtgtcctcc

SEQ ID NO: 527 - DNA, 381 bp, Artificial Sequence
  Description of Artificial Sequence: Synthetic polynucleotide
caggtgcagctccaggagagtggcggaggctccgtgcaggctgggggctctctgcgtctgagctgtgccgcaagcggtagcatttacagctctgcctacatcgggtggtttcgtcaagcgccgggcaaaaagcgcgaaggcgtggccggaatctacacgcgcgatggctccaccgcttatgctgacagcgttaagggacgttttacgatcagccaggactctgccaaaaagactgtgtatctccagatgaactccctgaaacctgaggacacagccatgtattactgcgccgctggccgccgtacaaagagctatgtttacatctttcgccccgaagagtacaactactggggccagggaacccaagtgactgtgtccagt

SEQ ID NO: 528 - DNA, 360 bp, Artificial Sequence
  Description of Artificial Sequence: Synthetic polynucleotide
caggttcagttgcaggagtccggcggaggcagcgtgcaggccggaggctccttgcgcttgtcctgtgcggcttctggcttcaccttctcatctgctcacatgagttgggtgcgtcaggccccagggaaaggtcgcgagtggattgcctccatctacagcggtgggggcactttttatgcggacagcgtgaagggccgctttaccatcagccgtgacaacgctaagaacaccctgtatctccaactcaattccctcaagaccgaggatacagcgatgtactattgtgcaaccaaccgccttcactattactccgacgatgacagcctgcgcggacaggggacccaggtgacggtgtccagc

SEQ ID NO: 529 - DNA, 360 bp, Artificial Sequence
  Description of Artificial Sequence: Synthetic polynucleotide
caggtgcaactccaggaaagtggcggaggctcagtgcaggcaggtggctctctccgcctttcctgcgctgccagcggattcaccttctctaacgctcacatgagctgggttcgtcaggctcccggcaaaggccgtgaatggattagctccatctatagtggcggaagtacttggtacgcagatagcgtcaagggccgcttcactattagtcgggataactccaagaacactctgtacctccagctgaactcattgaaaaccgaggacacggctatgtactattgtgctgagaacaggctgcactattactccgacgatgactctctgaggggtcagggcacccaggtgaccgtcagctcc

SEQ ID NO: 530 - DNA, 375 bp, Artificial Sequence
  Description of Artificial Sequence: Synthetic polynucleotide
caggtccaactccaggagtccggcggaggcagcgtgcaggctggaggctctctccgcctgagctgcacagcttccagattcatcttcgatgactccgacatgggctggtatcgccaggctccagggaacgagtgcgaactggtgagcaccatctcttcagacggtagcacctattacgccgacagtgtgaaggggcgcttcaccatctcccgcgacaatgctaaaaatacggtgtatctccagatgaactccctcaaaccggaggacacagctgtatattactgtgctgcggaaccacggggctactatagcaactatggtggaaggcgcgagtgcaactactggggtcagggcacacaggtgacggtttcctcc

SEQ ID NO: 531 - DNA, 372 bp, Artificial Sequence
  Description of Artificial Sequence: Synthetic polynucleotide
caggtgcagctccaggagagcggcggtggctccgtgcaggctggtggcagcctgaagctgtcctgcaccgtgagtggcttcacagccgacgattctgatatgggctggtatcgccaaggccccggcaatgagtgcgagctggtaaccattagctcagacggctctacatactatgccgattctgttaagggccgctttactatctcacaggataatgccaagaacacagtgtacttgcagatgaactctctgaaaccggaagacacagctgtgtattactgtgctgcggagcctagagggtattacagcaattacgggggccggagagagtgtaactattgggggcagggcacccaagtgaccgtttcctcc

SEQ ID NO: 532 - DNA, 360 bp, Artificial Sequence
  Description of Artificial Sequence: Synthetic polynucleotide
caggtccagcttcaggaatctgggggcggtctcgtgcagcccggcgggtccctgcgtctgtcttgtgctgcgagcggcttcacgttctcaagtgcccacatgagctgggtaaggcaggcaccgggcaaggggcgcgagtggattgcaagcatctattcaggcgggggcacattctacgccgacagcgtgaagggacgttttacaatctccagagataacgcaaagaacactctctacctccaactcaactccttgaaggcggaagatactgcaatgtattactgtgctactaaccgtcttcattattactctgacgatgactccctgcgggggcagggtacacaggtgacagtgagttcc

SEQ ID NO: 533 - DNA, 360 bp, Artificial Sequence
  Description of Artificial Sequence: Synthetic polynucleotide
caggtgcagctgcaagaatctggtggagggctggtccagcctgggggctccctgcgcctctcatgtgtcgcatctggcttcaccttcagcaacgcccacatgagctgggttcgccaagcccctgggaagggccgggagtggatctccagtatctattccggcggaagcacttggtatgcagacagcgtcaaaggacggttcactatttctcgtgataattctaagaacaccctgtaccttcagctgaacagcctgaagaccgaggacactgctatgtactattgtgctgagaatcgcctgcattactatagcgacgatgacagtctgcgcggacaggggacccaggtcaccgtgtcctct

SEQ ID NO: 534 - DNA, 360 bp, Artificial Sequence
  Description of Artificial Sequence: Synthetic polynucleotide
caggttcagttgcaggaatcaggaggcggtctggtgcagcctgggggctctctgcgtctctcctgcgccgcttccggcttcacattctccaacgcccacatgagctgggtccgccaggcccctgggaagggccgcgagtggatctccagtatctacagcgggggctccacttggtacgcagacagcgtcaaagggaggtttaccattagccgtgacaattctaagaacacattgtatttgcagctgaactctcttaaaaccgaggacaccgccatgtactattgtgctgagaacaggctccactattactcagacgatgactcacttcgcgggcagggaacccaggtcaccgtctcctct

SEQ ID NO: 535 - DNA, 351 bp, Artificial Sequence
  Description of Artificial Sequence: Synthetic polynucleotide
caagtccagctccaggaaagcggcggtggcctggtgcaacctggcgggtctctgcgcttgtcatgcgctgcctccggcttcaccttctcatcttaccctatgacctgggcgcgtcaggctcccggcaagggattggagtgggtgtctactattgcctccgacggtggcagcacggcctacgcagcgtctgtagaaggacgcttcacaattagcagagacaacgcaaaatctactttgtaccttcagctcaacagcctgaagaccgaagacacagctatgtattactgcacaaaaggctacggggacggcacgccagcgcctggacaggggacacaggtgaccgtatcttct

SEQ ID NO: 536 - DNA, 363 bp, Artificial Sequence
  Description of Artificial Sequence: Synthetic polynucleotide
caggtgcagttgcaggaatcagggggtggctctgtgcaggccgggggctccctgcgtctgtcctgtactgcgagcggcttcacctttgatgaccgcgagatgaactggtatcgccaggctccggggaacgagtgcgaactcgtgtctacaattagctccgatggttcaacatactatgctgattctgtcaaaggtcgctttaccatctcacaggacaacgccaagaacaccgtctacctccagatggactctgtgaagcctgaagataccgccgtatactattgcgccgctgactttatgattgccattcaggctccgggtgctggatgctggggtcaggggactcaggtgaccgtgtcttca

SEQ ID NO: 537 - DNA, 375 bp, Artificial Sequence
  Description of Artificial Sequence: Synthetic polynucleotide
caagtgcagttgcaggaaagcggcggtgggtccgtgcaagccggaggttctctccgcctgtcttgcactgcctcaggttttaccttcgacgattccgatatgggctggtacaggcaggctcccggcaatgagtgcgagctggtgtctacgatctcaagtgatggctccacctactatgccgatagcgtaaaaggaaggtttactattagccaggataacgcgaagaacacggtgtacctccagatgaacagtctcaagccggaggatactgccgtgtattactgtgctgccgagccgcgtggctattactccaactacggtggcagacgtgaatgcaattactggggacagggtactcaggttaccgtgtcctct

SEQ ID NO: 538 - DNA, 357 bp, Artificial Sequence
  Description of Artificial Sequence: Synthetic polynucleotide
caggttcaacttcaggaatccgggggcggttccgtgcaagccgggggtagcctgcgtctgtcttgcgtggccagcggctatacctcctgtatgggttggtttcggcaggctcctgggaaggagcgcgaagccgtggcgaccatctacacacggggccgcagcatctattacgctgacagtgtgaagggccgcttcaccatctcccaggataacgccaagaataccctgtatctgcaaatgaactccctgaagcctgaggacatcgccatgtattcctgcgcagctggagggtactcatggtccgctgggtgcgagtttaattattggggccaaggaacccaggtgaccgtctcctca

SEQ ID NO: 539 - DNA, 351 bp, Artificial Sequence
  Description of Artificial Sequence: Synthetic polynucleotide
caagtgcagctccaggagtctggcgggggcctggttcagcctggtgggtccctgcgcctgtcttgcacggcttccggctttagcttctcctcatatccaatgacctgggcacgccaggctcctggtaagggcctggagtgggtctccaccatcgcctctgatggtgggtcaactgcctatgctgcctccgtcgagggtagattcacaatcagcagagacaacgccaaatccacgctgtacctgcaactcaactccttgaagaccgaggacacagctatgtattactgtaccaaaggctacggcgacggcactcctgctcccggacaggggacccaggtgactgtgtctagc

SEQ ID NO: 540 - DNA, 351 bp, Artificial Sequence
  Description of Artificial Sequence: Synthetic polynucleotide
caggtccaacttcaggaaagcgggggtggactggtacagccagggggcagtctgcgcctgtcctgtgccgcaagcgggttttctttctccagttaccccatgacctgggctcgccaagcacctggaaagggactggagtgggtgtctactattgcgtcagatggtgggagtacggcttacgccgcgagcgtggagggtcgttttacgatcagtagggacaacgccaaaagcactctgtacctccagcttaacagcctgaagaccgaggacaccgccatgtattactgtaccaagggctacggagacggcacccctgcgccggggcaaggcacccaggtgaccgtaagttca

SEQ ID NO: 541 - DNA, 381 bp, Artificial Sequence
  Description of Artificial Sequence: Synthetic polynucleotide
caggtgcaactccaggagtccggcgggggctccgtgctggctggcggatctttgaggctgtcttgcgtggcttctggctatggctataattacatcggctggttccgtcagacacccggcaaggagcgcgaaggggtggcggtcatttacacagggggtggggacacttattacgccgactccgtcaagggtaggtttaccgctagtcgcgataatgccaaaagtacgctgtacctgcaaatgaacagcttggagccagaggacaccgccatgtattacggagtggctcgctactgtgtgggcagtgtgtacgcttgcctgcgcggaggccacgacgagtacgcacactggggccagggaacccaggtgacagtgtctagc

SEQ ID NO: 542 - DNA, 402 bp, Artificial Sequence
  Description of Artificial Sequence: Synthetic polynucleotide
caggtgcagctccaggagtctgggggtggcagcgtccagccaggtggctcattgagactgtcttgtgctgcatctggctccacctacgctaattacctgatgggatggttcaggcaggcccctggtaaggagcgtgagggcgtggccgctatctattctggcggtgggtccacctactatgctgactccgtcaagggacgcttcactatttctcaagacaatgccaagaacactttgtacttgcaaatgaactcactcaaacctgaggacaccgcgatgtactattgcgcagcggcatccgcagtgaagggagacaaaggggatatcgtggtagttgtgaccggcacccagcgtatggagtacgactactggggacatggcacccaggtgacagttagctcc

SEQ ID NO: 543 - DNA, 396 bp, Artificial Sequence
  Description of Artificial Sequence: Synthetic polynucleotide
caggtacagttgcaggagagtggtgggggttccgtccaggccggtgcctctcttcgcctcagttgtagcgtgagcggtttcacgttcgacgagtcagtgatgtcctggttgcgccagggtcccggcaatgagtgcgacgcggtcgctattatcagctccgatgacaacacctattacgacgatagcgtgaaaggccgctttaccatctccgaggacaacgccaaaaacatggtgtatctgcaaatgaactcactgaagccggaagacaccgcagtgtactattgcgccgcgcgtcggcgcagacctgtgtacgattccgattatgaactccggccacgtccgctgtgtggcgatttcggcgtgtggggccaggggacccaggtgacggtctcctcc

SEQ ID NO: 544 - DNA, 387 bp, Artificial Sequence
  Description of Artificial Sequence: Synthetic polynucleotide
caggtgcagctccaggaatctggcgggggctctgtgcaggctggtggctcccttcgcctgtcctgtattggctccggtcttcctttcgacgaggatgacatgggctggtatcgccaggcccctgggaatgagtgtgaattggtcagctcaatctccagtgacggcaccgcctattacgccgattccgtcaagggacgcttcactatctccagagacaacgccaagaacactgtgctgttgcagatgaactccctgaagcccgaggataccgctgtctattactgcgcagccggggtccacagacagttcggcggttccagttcctgcggcgacgccttctacggcatggattactggggcaagggaactcaggtcacagtgtcttcc

SEQ ID NO: 545 - DNA, 372 bp, Artificial Sequence
  Description of Artificial Sequence: Synthetic polynucleotide
caggttcagcttcaggagtccggcgggggctccgtacaggcagggggctcactgcgtctttcctgtgtggcgagtggcgacgtgtatggccgtaacagcatggcttggttccggcaggcacctggaaaggaacgcgagggcgttgcagttgggtattccgtagtgacaaccacttactatgccgacagtgtgaagggccggtttacgatctcagaggacaacgataaaaacacagtgtacctggagatgaactccctgaagccggaagacactgctatgtattactgcgctgccgatggcaacctgtggcgcggactcaggccctccgagtacacttattggggtcagggcacccaggtgaccgtttcaagt

SEQ ID NO: 546 - DNA, 384 bp, Artificial Sequence
  Description of Artificial Sequence: Synthetic polynucleotide
caggtccagcttcaggagtcaggtggcggtagtgtccaggcaggcggtagcctgcgccttagctgtgctacatccggcttcccttactcacgctattgtatgggctggttcaggcaagctcccggtaaagagcgcgagggagtggcagccatcgagcctgacgggagcacatcttatgctgactctgtaaaggggcgtttcaccatctctcaggacaacgccgttaatacactgtacttgcaaatgaataacctgaagcccgaggacacagctatgtattactgcgcagccgacgagcgttgcttctatttgaaggactatgacctcagaaggccagcccagtaccgctactgggggcagggcacccaggttaccgtgtcatct

SEQ ID NO: 547 - DNA, 396 bp, Artificial Sequence
  Description of Artificial Sequence: Synthetic polynucleotide
caggtgcagttgcaggagagtggcggtggcctcgtgcagcctggcggaagcctccgtctgagctgcactgtgtccggcttcactttcgacgagagcgacatgggctggctgaggcagaaccctggtaacgagtgcggcgttgtgagtgtcatcacgtctgatgacaacccatactatgatgacagcgtcaagggccgctttactatctccgaggataacgccaagaacatggtgtacctccagatgaactcactgaagcccgaggataccggcgtttattactgtgcaaccaggagccgtcagcctgtgtactcacgcgattacgagctgcggccccgccccctctgtggagactttggtgtgtggggccagggcacccaggtgactgtttccagc

SEQ ID NO: 548 - DNA, 378 bp, Artificial Sequence
  Description of Artificial Sequence: Synthetic polynucleotide
caggtgcagttgcaggagagtggagggggctcagtgcaggctggcgggtccttgcgtctgtcttgcaccgcctctggcttcaccttcgatgacttcgatatgggttggtatcgccaggctccagggaacgagtgcgaattggtcagcactatcagcgacgatggctcaacatattacgccgactctgtgaagggacggtctagcattagccgggacaacgcaaagaacaccgtctatctccagatgaaccgcttgaagcctgaggataccggagtctattactgcgccgctgagggcgcgttgggctccaagactaattgtggctgggtgggcaacttcggatattggggccagggaacacaggttaccgtttccagc

SEQ ID NO: 549 - DNA, 378 bp, Artificial Sequence
  Description of Artificial Sequence: Synthetic polynucleotide
caggtgcagttgcaggagtctggaggcggttccgttcaggccgggggctctctgcgcctgtcctgcgctgcctccgggtttacatttgacgatttcgatatgggctggtatcgccaggcccctggcaacgagtgcgaactggtgtctactatctccgatgacggctcaacctactatgcagactccgtaaagggcagatccagcatctcccgcgacaatgccaaaaacactgtgtacctccagatgaactccctcaagcctgaggatacggcggtgtactattgtgctgccgagggtgcgctcggtagcaagactaattgcggctgggtgggcaacttcgggtactggggtcaggggacccaggtaaccgtgtcttct

SEQ ID NO: 550 - DNA, 378 bp, Artificial Sequence
  Description of Artificial Sequence: Synthetic polynucleotide
caggtgcagttgcaggaaagcggtgggggcctggtgcagcccggaggcagcctgcgcttgagctgcgctgcctctggcttcacattcgatgacttcgatatgggctggtatcgtcaagcacccggaaacgagtgcgagctggtgagtacaatcagtgatgacggatctacctactatgccgacagcgtcaagggaagatccagcatcagtcgcgacaacgccaagagcaccgtttacctccagatgaaccgcctcaagcctgaggacacaggagtctattactgtgctgcggagggggccttgggcagcaagactaactgtggatgggtgggaaacttcgggtattggggtcagggtacacaggtcacagtgtcttca

SEQ ID NO: 551 - DNA, 378 bp, Artificial Sequence
  Description of Artificial Sequence: Synthetic polynucleotide
caagttcagcttcaggaaagtgggggcgggctggtgcagccagggggttccctgaagctgagctgcgctgcctctgggtttacattctctgatcgcgacatgggctggtatcgccaagcgccgggcaatgaatgcgaaagagtgagtactatttctgacgatggttctacttactatgctgactccgtgaagggccgtagctccatttccagggacaacgcgaagaacaccgtatacctccagatgaactctctgaagcccgaggacaccgctgtgtattactgcgctgccgagggggctctcggctcaaagaccaactgcggatgggtcggtaacttcggctactggggccagggcacccaagtgacagtctcctcc

SEQ ID NO: 552 - DNA, 381 bp, Artificial Sequence
  Description of Artificial Sequence: Synthetic polynucleotide
caggtccagttgcaggagagcgggggtggaagcgtcctcgccggagggagcctccgtttgagctgcgtcgcctcaggctacggctacaattacatcggatggttcagacagacgcctggtaaagagcgggaaggcgtcgccgtgatttatatcggtggcggagacacctattacgctgactcagtgaaggggcgtttcaccgcaagccgggacaacgctaagagcaccctgtacctccagatgaactctctcgaacctgaggacactgcaatgtattactgcgtggctcgttactgcgtcgggagtgtctacgcctgcctgaggggcgggcatgatgagtatgcccactggggacaaggaacacaggtgactgtctccagt

SEQ ID NO: 553 - DNA, 381 bp, Artificial Sequence
  Description of Artificial Sequence: Synthetic polynucleotide
caggttcagctccaggagtctggtggcggttccgtgctggccgggggctctctgcgcctgtcttgtgtcgcctcagggtacggctataactacattggctggttcagacagacccctgggaaagagcgggagggtgtggctgtcatttacaccggcggaggcgacacctactatgccgattcagttaagggcaggtttaccgcgagccgtgacaacgcgaagtctactctgtacctgcaaatgaacagcctggaacctgaggatactgcgatgtactattgtgtggcccggtactgcgtaggctcagtgtatgcctgcctgcgcgggggtcacgacgagtacgcacactggggacagggaactcaggtcaccgtgtctagc

SEQ ID NO: 554 - DNA, 378 bp, Artificial Sequence
  Description of Artificial Sequence: Synthetic polynucleotide
caggtgcaactccaggagtccggcgggggctccgtccaagctggtggctcactgaggcttagctgtgctgcctccggctttactttcgacgatttcgacatgggttggtatcgccaggctccgggcaatgagtgcgagctggtctctaccatttccgatgacggctctacctactatgccaacagtgttaagggtaggtcttccatctcccgcgacaacgctaagaatatggtgtacttgcagatgaactctctgaagcctgaggacactgctgtctactattgcgctgccgaaggtgccctgggctcaaagactaattgcggctgggtcggtaactttggctactggggtcaggggactcaggtgaccgtcagctcc

SEQ ID NO: 555 - DNA, 378 bp, Artificial Sequence
  Description of Artificial Sequence: Synthetic polynucleotide
caggtccagttgcaggaaagcggcgggggctctgttcaggcaggcggaagccttcgtctgtcctgtactgccagtggtttcacctttgatgactttgacatgggctggtatcggcaagcccccggaaacgagtgcgagctggtatccaccatttccgatgacgggtccacgtactatgctgatagcgtgaagggcaggtcttccatcagccgggacaacgccaagaacacagtgtatttgcagatgaaccgcctcaagccagaagacaccggggtatattactgtgcagcggaaggtgccctgggtagcaagatgaactgcggatgggtgggtaattttggatactggggccagggcacgcaggttacagtgtccagc

SEQ ID NO: 556 - protein, 483 aa, Artificial Sequence
  Description of Artificial Sequence: Synthetic polypeptide
QVQLQESGGGSVQAGGSLRLSCGASGYTYSSYCMGWFRQVPGKEREGVAVIDSDGSTSYADSVKGRFTISKDNGKNTLYLQMNSLKPEDTAMYYCAADLGHYRPPCGVLYLGMDYWGKGTQVTVSSGGGSQVQLQESGGGSVQAGGSLRLSCTASGFTFDDREMNWYRQAPGNECELVSTISSDGSTYYADSVKGRFTISQDNAKNTVYLQMDSVKPEDTAVYYCAADFMIAIQAPGAGCWGQGTQVTVSSASRVESKYGPPCPPCPAPEFLGGPSVFLFPPKPKDTLMISRTPEVTCVVVDVSQEDPEVQFNWYVDGVEVHNAKTKPREEQFGSTYRVVSVLTVLHQDWLNGKEYKCKVSNKGLPSSIEKTISKAKGQPREPQVYTLPPSQEEMTKNQVSLTCLVKGFYPSDIAVEWESNGQPENNYKTTPPVLDSDGSFFLYSRLTVDKSRWQEGNVFSCSVMHEALHNHYTQKSLSLSLG

SEQ ID NO: 557 - DNA, 1449 bp, Artificial Sequence
  Description of Artificial Sequence: Synthetic polynucleotide
caagtgcagctgcaagagagcggaggaggaagcgtccaagccggaggctctctgaggctgagctgtggagccagcggctacacttacagcagctactgtatgggctggtttaggcaagtgcccggcaaggagagagagggcgtggccgtgatcgattccgatggcagcacaagctacgctgacagcgtgaagggaaggttcacaatcagcaaggacaacggcaagaacacactctatctgcagatgaacagcctcaagccagaggacacagccatgtactactgcgccgctgatctgggccactataggcctccttgtggcgtgctgtatctgggcatggattactggggcaagggcacacaagtgacagtctcgagcggcggaggatcccaagtgcagctgcaagagagcggaggaggaagcgtgcaagccggcggatctctgagactcagctgtactgcctccggcttcacattcgacgatagggagatgaactggtataggcaagcccccggcaatgagtgcgagctggtgagcacaatctccagcgatggcagcacttactacgccgatagcgtgaagggaaggttcactatctcccaagataacgccaagaacacagtctatctgcagatggactccgtcaagccagaggatactgccgtgtactactgcgccgccgacttcatgatcgccatccaagcccccggcgctggctgttggggacaaggcactcaagtgacagtctcgtctgctagcagagtggaatctaagtacgggcccccttgtcctccatgtcctgctccagagtttctcggcggaccctccgtgttcctgtttcctccaaagcctaaggacaccctgatgatctctcggacccctgaagtgacctgcgtggtggtggatgtgtcccaagaagatcccgaggtgcagttcaattggtacgtggacggcgtggaagtgcacaacgccaagaccaagcctagagaggaacagttcggctccacctacagagtggtgtccgtgctgacagtgctgcaccaggattggctgaacggcaaagagtacaagtgcaaggtgtccaacaagggcctgccttccagcatcgaaaagaccatctccaaggccaagggccagcctagggaaccccaggtttacaccctgcctccaagccaagaggaaatgaccaagaaccaggtgtccctgacctgcctggtcaagggcttctacccttccgatatcgccgtggaatgggagagcaatggccagcctgagaacaactacaagaccacacctcctgtgctggactccgacggctccttctttctgtactctcggctgaccgtggacaagagcagatggcaagagggcaacgtgttctcctgctccgtgatgcacgaggccctgcacaatcactacacccagaagtccctgtctctgtccctggga

SEQ ID NO: 558 - protein, 480 aa, Artificial Sequence
  Description of Artificial Sequence: Synthetic polypeptide
QVQLQESGGGLVQPGGSLRLSCTASGFSFSSYPMTWARQAPGKGLEWVSTIASDGGSTAYAASVEGRFTISRDNAKSTLYLQLNSLKTEDTAMYYCTKGYGDGTPAPGQGTQVTVSSGGGSQVQLQESGGGSVQAGGSLRLSCTVSGYTYSSNCMGWFRQAPGKEREGVATIYTGGGNTYYADSVKGRFTISQDNAKNTVYLQMNNLKPEDTAMYYCAAEPLSRVYGGSCPTPTFDYWGQGTQVTVSSASRVESKYGPPCPPCPAPEFLGGPSVFLFPPKPKDTLMISRTPEVTCVVVDVSQEDPEVQFNWYVDGVEVHNAKTKPREEQFGSTYRVVSVLTVLHQDWLNGKEYKCKVSNKGLPSSIEKTISKAKGQPREPQVYTLPPSQEEMTKNQVSLTCLVKGFYPSDIAVEWESNGQPENNYKTTPPVLDSDGSFFLYSRLTVDKSRWQEGNVFSCSVMHEALHNHYTQKSLSLSLG

SEQ ID NO: 559 - DNA, 1440 bp, Artificial Sequence
  Description of Artificial Sequence: Synthetic polynucleotide
caagtgcagctgcaagagagcggaggaggactggtccagcccggcggctctctgaggctgagctgcactgcttccggcttcagcttcagcagctaccctatgacatgggctaggcaagcccccggcaaaggactggaatgggtgagcactattgccagcgatggaggcagcacagcctacgctgccagcgtggagggaaggttcacaatctctagggacaatgccaagagcacactgtatctgcagctgaactctctgaagacagaggacactgccatgtactactgcactaagggctacggcgatggcacaccagctcccggccaaggcacacaagtgactgtctcgagcggcggaggatcccaagtgcagctgcaagagagcggaggaggaagcgtgcaagccggaggctctctgaggctgagctgtacagtgtccggctacacttacagctccaattgcatgggctggtttaggcaagcccccggcaaggaaagagagggcgtggccactatctacactggcggcggcaacacatactacgccgatagcgtgaagggaaggttcactatcagccaagataacgccaagaacacagtgtatctgcagatgaacaatctgaagccagaggacactgccatgtactactgtgctgctgagccactgtctagggtgtacggcggcagctgcccaactcctacattcgactactggggccaaggcacacaagtgactgtctcgtctgctagcagagtggaatctaagtacgggcccccttgtcctccatgtcctgctccagagtttctcggcggaccctccgtgttcctgtttcctccaaagcctaaggacaccctgatgatctctcggacccctgaagtgacctgcgtggtggtggatgtgtcccaagaagatcccgaggtgcagttcaattggtacgtggacggcgtggaagtgcacaacgccaagaccaagcctagagaggaacagttcggctccacctacagagtggtgtccgtgctgacagtgctgcaccaggattggctgaacggcaaagagtacaagtgcaaggtgtccaacaagggcctgccttccagcatcgaaaagaccatctccaaggccaagggccagcctagggaaccccaggtttacaccctgcctccaagccaagaggaaatgaccaagaaccaggtgtccctgacctgcctggtcaagggcttctacccttccgatatcgccgtggaatgggagagcaatggccagcctgagaacaactacaagaccacacctcctgtgctggactccgacggctccttctttctgtactctcggctgaccgtggacaagagcagatggcaagagggcaacgtgttctcctgctccgtgatgcacgaggccctgcacaatcactacacccagaagtccctgtctctgtccctggga

SEQ ID NO: 560 - protein, 231 aa, Homo sapiens
RVESKYGPPCPSCPAPEFLGGPSVFLFPPKPKDTLMISRTPEVTCVVVDVSQEDPEVQFNWYVDGVEVHNAKTKPREEQFNSTYRVVSVLTVLHQDWLNGKEYKCKVSNKGLPSSIEKTISKAKGQPREPQVYTLPPSQEEMTKNQVSLTCLVKGFYPSDIAVEWESNGQPENNYKTTPPVLDSDGSFFLYSRLTVDKSRWQEGNVFSCSVMHEALHNHYTQKSLSLSLGK

SEQ ID NO: 561 - protein, 5 aa, Homo sapiens
EPKSC

SEQ ID NO: 562 - protein, 5 aa, Artificial Sequence
  Description of Artificial Sequence: Synthetic peptide
EPKSS

SEQ ID NO: 563 - protein, 10 aa, Homo sapiens
DKTHTCPPCP

SEQ ID NO: 564 - protein, 227 aa, Homo sapiens
DKTHTCPPCPAPELLGGPSVFLFPPKPKDTLMISRTPEVTCVVVDVSHEDPEVKFNWYVDGVEVHNAKTKPREEQYNSTYRVVSVLTVLHQDWLNGKEYKCKVSNKALPAPIEKTISKAKGQPREPQVYTLPPSRDELTKNQVSLTCLVKGFYPSDIAVEWESNGQPENNYKTTPPVLDSDGSFFLYSKLTVDKSRWQQGNVFSCSVMHEALHNHYTQKSLSLSPGK

SEQ ID NO: 565 - protein, 800 aa, Artificial Sequence
  Description of Artificial Sequence: Synthetic polypeptide
  SITE (1)..(20): This region may encompass 1-20 residues
  SITE (21)..(40): This region may encompass 1-20 residues
  SITE (41)..(60): This region may encompass 1-20 residues
  SITE (61)..(80): This region may encompass 1-20 residues
  SITE (81)..(100): This region may encompass 1-20 residues
  SITE (101)..(120): This region may encompass 1-20 residues
  SITE (121)..(140): This region may encompass 1-20 residues
  SITE (141)..(160): This region may encompass 1-20 residues
  SITE (161)..(180): This region may encompass 1-20 residues
  SITE (181)..(200): This region may encompass 1-20 residues
  SITE (201)..(220): This region may encompass 1-20 residues
  SITE (221)..(240): This region may encompass 1-20 residues
  SITE (241)..(260): This region may encompass 1-20 residues
  SITE (261)..(280): This region may encompass 1-20 residues
  SITE (281)..(300): This region may encompass 1-20 residues
  SITE (301)..(320): This region may encompass 1-20 residues
  SITE (321)..(340): This region may encompass 1-20 residues
  SITE (341)..(360): This region may encompass 1-20 residues
  SITE (361)..(380): This region may encompass 1-20 residues
  SITE (381)..(400): This region may encompass 1-20 residues
  SITE (401)..(420): This region may encompass 1-20 residues
  SITE (421)..(440): This region may encompass 1-20 residues
  SITE (441)..(460): This region may encompass 1-20 residues
  SITE (461)..(480): This region may encompass 1-20 residues
  SITE (481)..(500): This region may encompass 1-20 residues
  SITE (501)..(520): This region may encompass 1-20 residues
  SITE (521)..(540): This region may encompass 1-20 residues
  SITE (541)..(560): This region may encompass 1-20 residues
  SITE (561)..(580): This region may encompass 1-20 residues
  SITE (581)..(600): This region may encompass 1-20 residues
  SITE (601)..(620): This region may encompass 1-20 residues
  SITE (621)..(640): This region may encompass 1-20 residues
  SITE (641)..(660): This region may encompass 1-20 residues
  SITE (661)..(680): This region may encompass 1-20 residues
  SITE (681)..(700): This region may encompass 1-20 residues
  SITE (701)..(720): This region may encompass 1-20 residues
  SITE (721)..(740): This region may encompass 1-20 residues
  SITE (741)..(760): This region may encompass 1-20 residues
  SITE (761)..(780): This region may encompass 1-20 residues
  SITE (781)..(800): This region may encompass 1-20 residues
  SITE (1)..(800): This sequence may encompass 1-20 "(Gly)m(Ser)o" repeating units, wherein m = 1 to 20, o = 1 to 20
  See specification as filed for detailed description of substitutions and preferred embodiments
GGGGGGGGGGGGGGGGGGGGSSSSSSSSSSSSSSSSSSSSGGGGGGGGGGGGGGGGGGGGSSSSSSSSSSSSSSSSSSSSGGGGGGGGGGGGGGGGGGGGSSSSSSSSSSSSSSSSSSSSGGGGGGGGGGGGGGGGGGGGSSSSSSSSSSSSSSSSSSSSGGGGGGGGGGGGGGGGGGGGSSSSSSSSSSSSSSSSSSSSGGGGGGGGGGGGGGGGGGGGSSSSSSSSSSSSSSSSSSSSGGGGGGGGGGGGGGGGGGGGSSSSSSSSSSSSSSSSSSSSGGGGGGGGGGGGGGGGGGGGSSSSSSSSSSSSSSSSSSSSGGGGGGGGGGGGGGGGGGGGSSSSSSSSSSSSSSSSSSSSGGGGGGGGGGGGGGGGGGGGSSSSSSSSSSSSSSSSSSSSGGGGGGGGGGGGGGGGGGGGSSSSSSSSSSSSSSSSSSSSGGGGGGGGGGGGGGGGGGGGSSSSSSSSSSSSSSSSSSSSGGGGGGGGGGGGGGGGGGGGSSSSSSSSSSSSSSSSSSSSGGGGGGGGGGGGGGGGGGGGSSSSSSSSSSSSSSSSSSSSGGGGGGGGGGGGGGGGGGGGSSSSSSSSSSSSSSSSSSSSGGGGGGGGGGGGGGGGGGGGSSSSSSSSSSSSSSSSSSSSGGGGGGGGGGGGGGGGGGGGSSSSSSSSSSSSSSSSSSSSGGGGGGGGGGGGGGGGGGGGSSSSSSSSSSSSSSSSSSSSGGGGGGGGGGGGGGGGGGGGSSSSSSSSSSSSSSSSSSSSGGGGGGGGGGGGGGGGGGGGSSSSSSSSSSSSSSSSSSSS

SEQ ID NO: 566 - protein, 100 aa, Artificial Sequence
  Description of Artificial Sequence: Synthetic polypeptide
  SITE (1)..(100): This sequence may encompass 1-20 "Gly Ser Gly Gly Ser" repeating units
  See specification as filed for detailed description of substitutions and preferred embodiments
GSGGSGSGGSGSGGSGSGGSGSGGSGSGGSGSGGSGSGGSGSGGSGSGGSGSGGSGSGGSGSGGSGSGGSGSGGSGSGGSGSGGSGSGGSGSGGSGSGGS

SEQ ID NO: 567 - protein, 1200 aa, Artificial Sequence
  Description of Artificial Sequence: Synthetic polypeptide
  SITE (1)..(20): This region may encompass 1-20 residues
  SITE (21)..(40): This region may encompass 1-20 residues
  SITE (41)..(60): This region may encompass 1-20 residues
  SITE (61)..(80): This region may encompass 1-20 residues
  SITE (81)..(100): This region may encompass 1-20 residues
  SITE (101)..(120): This region may encompass 1-20 residues
  SITE (121)..(140): This region may encompass 1-20 residues
  SITE (141)..(160): This region may encompass 1-20 residues
  SITE (161)..(180): This region may encompass 1-20 residues
  SITE (181)..(200): This region may encompass 1-20 residues
  SITE (201)..(220): This region may encompass 1-20 residues
  SITE (221)..(240): This region may encompass 1-20 residues
  SITE (241)..(260): This region may encompass 1-20 residues
  SITE (261)..(280): This region may encompass 1-20 residues
  SITE (281)..(300): This region may encompass 1-20 residues
  SITE (301)..(320): This region may encompass 1-20 residues
  SITE (321)..(340): This region may encompass 1-20 residues
  SITE (341)..(360): This region may encompass 1-20 residues
  SITE (361)..(380): This region may encompass 1-20 residues
  SITE (381)..(400): This region may encompass 1-20 residues
  SITE (401)..(420): This region may encompass 1-20 residues
  SITE (421)..(440): This region may encompass 1-20 residues
  SITE (441)..(460): This region may encompass 1-20 residues
  SITE (461)..(480): This region may encompass 1-20 residues
  SITE (481)..(500): This region may encompass 1-20 residues
  SITE (501)..(520): This region may encompass 1-20 residues
  SITE (521)..(540): This region may encompass 1-20 residues
  SITE (541)..(560): This region may encompass 1-20 residues
  SITE (561)..(580): This region may encompass 1-20 residues
  SITE (581)..(600): This region may encompass 1-20 residues
  SITE (601)..(620): This region may encompass 1-20 residues
  SITE (621)..(640): This region may encompass 1-20 residues
  SITE (641)..(660): This region may encompass 1-20 residues
  SITE (661)..(680): This region may encompass 1-20 residues
  SITE (681)..(700): This region may encompass 1-20 residues
  SITE (701)..(720): This region may encompass 1-20 residues
  SITE (721)..(740): This region may encompass 1-20 residues
  SITE (741)..(760): This region may encompass 1-20 residues
  SITE (761)..(780): This region may encompass 1-20 residues
  SITE (781)..(800): This region may encompass 1-20 residues
  SITE (801)..(820): This region may encompass 1-20 residues
  SITE (821)..(840): This region may encompass 1-20 residues
  SITE (841)..(860): This region may encompass 1-20 residues
  SITE (861)..(880): This region may encompass 1-20 residues
  SITE (881)..(900): This region may encompass 1-20 residues
  SITE (901)..(920): This region may encompass 1-20 residues
  SITE (921)..(940): This region may encompass 1-20 residues
  SITE (941)..(960): This region may encompass 1-20 residues
  SITE (961)..(980): This region may encompass 1-20 residues
  SITE (981)..(1000): This region may encompass 1-20 residues
  SITE (1001)..(1020): This region may encompass 1-20 residues
  SITE (1021)..(1040): This region may encompass 1-20 residues
  SITE (1041)..(1060): This region may encompass 1-20 residues
  SITE (1061)..(1080): This region may encompass 1-20 residues
  SITE (1081)..(1100): This region may encompass 1-20 residues
  SITE (1101)..(1120): This region may encompass 1-20 residues
  SITE (1121)..(1140): This region may encompass 1-20 residues
  SITE (1141)..(1160): This region may encompass 1-20 residues
  SITE (1161)..(1180): This region may encompass 1-20 residues
  SITE (1181)..(1200): This region may encompass 1-20 residues
  SITE (1)..(1200): This sequence may encompass 1-20 "(Gly)m(Ser)o(Gly)m" repeating units, wherein m = 1 to 20, o = 1 to 20
  See specification as filed for detailed description of substitutions and preferred embodiments
GGGGGGGGGGGGGGGGGGGGSSSSSSSSSSSSSSSSSSSSGGGGGGGGGGGGGGGGGGGGGGGGGGGGGGGGGGGGGGGGSSSSSSSSSSSSSSSSSSSSGGGGGGGGGGGGGGGGGGGGGGGGGGGGGGGGGGGGGGGGSSSSSSSSSSSSSSSSSSSSGGGGGGGGGGGGGGGGGGGGGGGGGGGGGGGGGGGGGGGGSSSSSSSSSSSSSSSSSSSSGGGGGGGGGGGGGGGGGGGGGGGGGGGGGGGGGGGGGGGGSSSSSSSSSSSSSSSSSSSSGGGGGGGGGGGGGGGGGGGGGGGGGGGGGGGGGGGGGGGGSSSSSSSSSSSSSSSSSSSSGGGGGGGGGGGGGGGGGGGGGGGGGGGGGGGGGGGGGGGGSSSSSSSSSSSSSSSSSSSSGGGGGGGGGGGGGGGGGGGGGGGGGGGGGGGGGGGGGGGGSSSSSSSSSSSSSSSSSSSSGGGGGGGGGGGGGGGGGGGGGGGGGGGGGGGGGGGGGGGGSSSSSSSSSSSSSSSSSSSSGGGGGGGGGGGGGGGGGGGGGGGGGGGGGGGGGGGGGGGGSSSSSSSSSSSSSSSSSSSSGGGGGGGGGGGGGGGGGGGGGGGGGGGGGGGGGGGGGGGGSSSSSSSSSSSSSSSSSSSSGGGGGGGGGGGGGGGGGGGGGGGGGGGGGGGGGGGGGGGGSSSSSSSSSSSSSSSSSSSSGGGGGGGGGGGGGGGGGGGGGGGGGGGGGGGGGGGGGGGGSSSSSSSSSSSSSSSSSSSSGGGGGGGGGGGGGGGGGGGGGGGGGGGGGGGGGGGGGGGGSSSSSSSSSSSSSSSSSSSSGGGGGGGGGGGGGGGGGGGGGGGGGGGGGGGGGGGGGGGGSSSSSSSSSSSSSSSSSSSSGGGGGGGGGGGGGGGGGGGGGGGGGGGGGGGGGGGGGGGGSSSSSSSSSSSSSSSSSSSSGGGGGGGGGGGGGGGGGGGGGGGGGGGGGGGGGGGGGGGGSSSSSSSSSSSSSSSSSSSSGGGGGGGGGGGGGGGGGGGGGGGGGGGGGGGGGGGGGGGGSSSSSSSSSSSSSSSSSSSSGGGGGGGGGGGGGGGGGGGGGGGGGGGGGGGGGGGGGGGGSSSSSSSSSSSSSSSSSSSSGGGGGGGGGGGGGGGGGGGGGGGGGGGGGGGGGGGGGGGGSSSSSSSSSSSSSSSSSSSSGGGGGGGGGGGGGGGGGGGG

SEQ ID NO: 568 - protein, 2000 aa, Artificial Sequence
  Description of Artificial Sequence: Synthetic polypeptide
  SITE (1)..(20): This region may encompass 1-20 residues
  SITE (21)..(40): This region may encompass 1-20 residues
  SITE (41)..(60): This region may encompass 1-20 residues
  SITE (61)..(80): This region may encompass 1-20 residues
  SITE (81)..(100): This region may encompass 1-20 residues
  SITE (101)..(120): This region may encompass 1-20 residues
  SITE (121)..(140): This region may encompass 1-20 residues
  SITE (141)..(160): This region may encompass 1-20 residues
  SITE (161)..(180): This region may encompass 1-20 residues
  SITE (181)..(200): This region may encompass 1-20 residues
  SITE (201)..(220): This region may encompass 1-20 residues
  SITE (221)..(240): This region may encompass 1-20 residues
  SITE (241)..(260): This region may encompass 1-20 residues
  SITE (261)..(280): This region may encompass 1-20 residues
  SITE (281)..(300): This region may encompass 1-20 residues
  SITE (301)..(320): This region may encompass 1-20 residues
  SITE (321)..(340): This region may encompass 1-20 residues
  SITE (341)..(360): This region may encompass 1-20 residues
  SITE (361)..(380): This region may encompass 1-20 residues
  SITE (381)..(400): This region may encompass 1-20 residues
  SITE (401)..(420): This region may encompass 1-20 residues
  SITE (421)..(440): This region may encompass 1-20 residues
  SITE (441)..(460): This region may encompass 1-20 residues
  SITE (461)..(480): This region may encompass 1-20 residues
  SITE (481)..(500): This region may encompass 1-20 residues
  SITE (501)..(520): This region may encompass 1-20 residues
  SITE (521)..(540): This region may encompass 1-20 residues
  SITE (541)..(560): This region may encompass 1-20 residues
  SITE (561)..(580): This region may encompass 1-20 residues
  SITE (581)..(600): This region may encompass 1-20 residues
  SITE (601)..(620): This region may encompass 1-20 residues
  SITE (621)..(640): This region may encompass 1-20 residues
  SITE (641)..(660): This region may encompass 1-20 residues
  SITE (661)..(680): This region may encompass 1-20 residues
  SITE (681)..(700): This region may encompass 1-20 residues
  SITE (701)..(720): This region may encompass 1-20 residues
  SITE (721)..(740): This region may encompass 1-20 residues
  SITE (741)..(760): This region may encompass 1-20 residues
  SITE (761)..(780): This region may encompass 1-20 residues
  SITE (781)..(800): This region may encompass 1-20 residues
  SITE (801)..(820): This region may encompass 1-20 residues
  SITE (821)..(840): This region may encompass 1-20 residues
  SITE (841)..(860): This region may encompass 1-20 residues
  SITE (861)..(880): This region may encompass 1-20 residues
  SITE (881)..(900): This region may encompass 1-20 residues
  SITE (901)..(920): This region may encompass 1-20 residues
  SITE (921)..(940): This region may encompass 1-20 residues
  SITE (941)..(960): This region may encompass 1-20 residues
  SITE (961)..(980): This region may encompass 1-20 residues
  SITE (981)..(1000): This region may encompass 1-20 residues
  SITE (1001)..(1020): This region may encompass 1-20 residues
  SITE (1021)..(1040): This region may encompass 1-20 residues
  SITE (1041)..(1060): This region may encompass 1-20 residues
  SITE (1061)..(1080): This region may encompass 1-20 residues
  SITE (1081)..(1100): This region may encompass 1-20 residues
  SITE (1101)..(1120): This region may encompass 1-20 residues
  SITE (1121)..(1140): This region may encompass 1-20 residues
  SITE (1141)..(1160): This region may encompass 1-20 residues
  SITE (1161)..(1180): This region may encompass 1-20 residues
  SITE (1181)..(1200): This region may encompass 1-20 residues
  SITE (1201)..(1220): This region may encompass 1-20 residues
  SITE (1221)..(1240): This region may encompass 1-20 residues
  SITE (1241)..(1260): This region may encompass 1-20 residues
  SITE (1261)..(1280): This region may encompass 1-20 residues
  SITE (1281)..(1300): This region may encompass 1-20 residues
  SITE (1301)..(1320): This region may encompass 1-20 residues
  SITE (1321)..(1340): This region may encompass 1-20 residues
  SITE (1341)..(1360): This region may encompass 1-20 residues
  SITE (1361)..(1380): This region may encompass 1-20 residues
  SITE (1381)..(1400): This region may encompass 1-20 residues
  SITE (1401)..(1420): This region may encompass 1-20 residues
  SITE (1421)..(1440): This region may encompass 1-20 residues
  SITE (1441)..(1460): This region may encompass 1-20 residues
  SITE (1461)..(1480): This region may encompass 1-20 residues
  SITE (1481)..(1500): This region may encompass 1-20 residues
  SITE (1501)..(1520): This region may encompass 1-20 residues
  SITE (1521)..(1540): This region may encompass 1-20 residues
  SITE (1541)..(1560): This region may encompass 1-20 residues
  SITE (1561)..(1580): This region may encompass 1-20 residues
  SITE (1581)..(1600): This region may encompass 1-20 residues
  SITE (1601)..(1620): This region may encompass 1-20 residues
  SITE (1621)..(1640): This region may encompass 1-20 residues
  SITE (1641)..(1660): This region may encompass 1-20 residues
  SITE (1661)..(1680): This region may encompass 1-20 residues
  SITE (1681)..(1700): This region may encompass 1-20 residues
  SITE (1701)..(1720): This region may encompass 1-20 residues
  SITE (1721)..(1740): This region may encompass 1-20 residues
  SITE (1741)..(1760): This region may encompass 1-20 residues
  SITE (1761)..(1780): This region may encompass 1-20 residues
  SITE (1781)..(1800): This region may encompass 1-20 residues
  SITE (1801)..(1820): This region may encompass 1-20 residues
  SITE (1821)..(1840): This region may encompass 1-20 residues
  SITE (1841)..(1860): This region may encompass 1-20 residues
  SITE (1861)..(1880): This region may encompass 1-20 residues
  SITE (1881)..(1900): This region may encompass 1-20 residues
  SITE (1901)..(1920): This region may encompass 1-20 residues
  SITE (1921)..(1940): This region may encompass 1-20 residues
  SITE (1941)..(1960): This region may encompass 1-20 residues
  SITE (1961)..(1980): This region may encompass 1-20 residues
  SITE (1981)..(2000): This region may encompass 1-20 residues
  SITE (1)..(2000): This sequence may encompass 1-20 "(Gly)m(Ser)o(Gly)m(Ser)o(Gly)m" repeating units, wherein m = 1 to 20, o = 1 to 20
  See specification as filed for detailed description of substitutions and preferred embodiments
GGGGGGGGGGGGGGGGGGGGSSSSSSSSSSSSSSSSSSSSGGGGGGGGGGGGGGGGGGGGSSSSSSSSSSSSSSSSSSSSGGGGGGGGGGGGGGGGGGGGGGGGGGGGGGGGGGGGGGGGSSSSSSSSSSSSSSSSSSSSGGGGGGGGGGGGGGGGGGGGSSSSSSSSSSSSSSSSSSSSGGGGGGGGGGGGGGGGGGGGGGGGGGGGGGGGGGGGGGGGSSSSSSSSSSSSSSSSSSSSGGGGGGGGGGGGGGGGGGGGSSSSSSSSSSSSSSSSSSSSGGGGGGGGGGGGGGGGGGGGGGGGGGGGGGGGGGGGGGGGSSSSSSSSSSSSSSSSSSSSGGGGGGGGGGGGGGGGGGGGSSSSSSSSSSSSSSSSSSSSGGGGGGGGGGGGGGGGGGGGGGGGGGGGGGGGGGGGGGGGSSSSSSSSSSSSSSSSSSSSGGGGGGGGGGGGGGGGGGGGSSSSSSSSSSSSSSSSSSSSGGGGGGGGGGGGGGGGGGGGGGGGGGGGGGGGGGGGGGGGSSSSSSSSSSSSSSSSSSSSGGGGGGGGGGGGGGGGGGGGSSSSSSSSSSSSSSSSSSSSGGGGGGGGGGGGGGGGGGGGGGGGGGGGGGGGGGGGGGGGSSSSSSSSSSSSSSSSSSSSGGGGGGGGGGGGGGGGGGGGSSSSSSSSSSSSSSSSSSSSGGGGGGGGGGGGGGGGGGGGGGGGGGGGGGGGGGGGGGGGSSSSSSSSSSSSSSSSSSSSGGGGGGGGGGGGGGGGGGGGSSSSSSSSSSSSSSSSSSSSGGGGGGGGGGGGGGGGGGGGGGGGGGGGGGGGGGGGGGGGSSSSSSSSSSSSSSSSSSSSGGGGGGGGGGGGGGGGGGGGSSSSSSSSSSSSSSSSSSSSGGGGGGGGGGGGGGGGGGGGGGGGGGGGGGGGGGGGGGGGSSSSSSSSSSSSSSSSSSSSGGGGGGGGGGGGGGGGGGGGSSSSSSSSSSSSSSSSSSSSGGGGGGGGGGGGGGGGGGGGGGGGGGGGGGGGGGGGGGGGSSSSSSSSSSSSSSSSSSSSGGGGGGGGGGGGGGGGGGGGSSSSSSSSSSSSSSSSSSSSGGGGGGGGGGGGGGGGGGGGGGGGGGGGGGGGGGGGGGGGSSSSSSSSSSSSSSSSSSSSGGGGGGGGGGGGGGGGGGGGSSSSSSSSSSSSSSSSSSSSGGGGGGGGGGGGGGGGGGGGGGGGGGGGGGGGGGGGGGGGSSSSSSSSSSSSSSSSSSSSGGGGGGGGGGGGGGGGGGGGSSSSSSSSSSSSSSSSSSSSGGGGGGGGGGGGGGGGGGGGGGGGGGGGGGGGGGGGGGGGSSSSSSSSSSSSSSSSSSSSGGGGGGGGGGGGGGGGGGGGSSSSSSSSSSSSSSSSSSSSGGGGGGGGGGGGGGGGGGGGGGGGGGGGGGGGGGGGGGGGSSSSSSSSSSSSSSSSSSSSGGGGGGGGGGGGGGGGGGGGSSSSSSSSSSSSSSSSSSSSGGGGGGGGGGGGGGGGGGGGGGGGGGGGGGGGGGGGGGGGSSSSSSSSSSSSSSSSSSSSGGGGGGGGGGGGGGGGGGGGSSSSSSSSSSSSSSSSSSSSGGGGGGGGGGGGGGGGGGGGGGGGGGGGGGGGGGGGGGGGSSSSSSSSSSSSSSSSSSSSGGGGGGGGGGGGGGGGGGGGSSSSSSSSSSSSSSSSSSSSGGGGGGGGGGGGGGGGGGGGGGGGGGGGGGGGGGGGGGGGSSSSSSSSSSSSSSSSSSSSGGGGGGGGGGGGGGGGGGGGSSSSSSSSSSSSSSSSSSSSGGGGGGGGGGGGGGGGGGGGGGGGGGGGGGGGGGGGGGGGSSSSSSSSSSSSSSSSSSSSGGGGGGGGGGGGGGGGGGGGSSSSSSSSSSSSSSSSSSSSGGGGGGGGGGGGGGGGGGGGGGGGGGGGGGGGGGGGGGGGSSSSSSSSSSSSSSSSSSSSGGGGGGGGGGGGGGGGGGGGSSSSSSSSSSSSSSSSSSSSGGGGGGGGGGGGGGGGGGGG

SEQ ID NO: 569 - protein, 480 aa, Artificial Sequence
  Description of Artificial Sequence: Synthetic polypeptide
  SITE (5)..(24): This region may encompass 1-20 residues
  SITE (29)..(48): This region may encompass 1-20 residues
  SITE (53)..(72): This region may encompass 1-20 residues
  SITE (77)..(96): This region may encompass 1-20 residues
  SITE (101)..(120): This region may encompass 1-20 residues
  SITE (125)..(144): This region may encompass 1-20 residues
  SITE (149)..(168): This region may encompass 1-20 residues
  SITE (173)..(192): This region may encompass 1-20 residues
  SITE (197)..(216): This region may encompass 1-20 residues
  SITE (221)..(240): This region may encompass 1-20 residues
  SITE (245)..(264): This region may encompass 1-20 residues
  SITE (269)..(288): This region may encompass 1-20 residues
  SITE (293)..(312): This region may encompass 1-20 residues
  SITE (317)..(336): This region may encompass 1-20 residues
  SITE (341)..(360): This region may encompass 1-20 residues
  SITE (365)..(384): This region may encompass 1-20 residues
  SITE (389)..(408): This region may encompass 1-20 residues
  SITE (413)..(432): This region may encompass 1-20 residues
  SITE (437)..(456): This region may encompass 1-20 residues
  SITE (461)..(480): This region may encompass 1-20 residues
  SITE (1)..(480): This sequence may encompass 1-20 "(Gly)(Ser)(Gly)(Gly)(Ser)m" repeating units, wherein m = 1 to 20
  See specification as filed for detailed description of substitutions and preferred embodiments
GSGGSSSSSSSSSSSSSSSSSSSSGSGGSSSSSSSSSSSSSSSSSSSSGSGGSSSSSSSSSSSSSSSSSSSSGSGGSSSSSSSSSSSSSSSSSSSSGSGGSSSSSSSSSSSSSSSSSSSSGSGGSSSSSSSSSSSSSSSSSSSSGSGGSSSSSSSSSSSSSSSSSSSSGSGGSSSSSSSSSSSSSSSSSSSSGSGGSSSSSSSSSSSSSSSSSSSSGSGGSSSSSSSSSSSSSSSSSSSSGSGGSSSSSSSSSSSSSSSSSSSSGSGGSSSSSSSSSSSSSSSSSSSSGSGGSSSSSSSSSSSSSSSSSSSSGSGGSSSSSSSSSSSSSSSSSSSSGSGGSSSSSSSSSSSSSSSSSSSSGSGGSSSSSSSSSSSSSSSSSSSSGSGGSSSSSSSSSSSSSSSSSSSSGSGGSSSSSSSSSSSSSSSSSSSSGSGGSSSSSSSSSSSSSSSSSSSSGSGGSSSSSSSSSSSSSSSSSSSS

SEQ ID NO: 570 - protein, 480 aa, Artificial Sequence
  Description of Artificial Sequence: Synthetic polypeptide
  SITE (4)..(23): This region may encompass 1-20 residues
  SITE (28)..(47): This region may encompass 1-20 residues
  SITE (52)..(71): This region may encompass 1-20 residues
  SITE (76)..(95): This region may encompass 1-20 residues
  SITE (100)..(119): This region may encompass 1-20 residues
  SITE (124)..(143): This region may encompass 1-20 residues
  SITE (148)..(167): This region may encompass 1-20 residues
  SITE (172)..(191): This region may encompass 1-20 residues
  SITE (196)..(215): This region may encompass 1-20 residues
  SITE (220)..(239): This region may encompass 1-20 residues
  SITE (244)..(263): This region may encompass 1-20 residues
  SITE (268)..(287): This region may encompass 1-20 residues
  SITE (292)..(311): This region may encompass 1-20 residues
  SITE (316)..(335): This region may encompass 1-20 residues
  SITE (340)..(359): This region may encompass 1-20 residues
  SITE (364)..(383): This region may encompass 1-20 residues
  SITE (388)..(407): This region may encompass 1-20 residues
  SITE (412)..(431): This region may encompass 1-20 residues
  SITE (436)..(455): This region may encompass 1-20 residues
  SITE (460)..(479): This region may encompass 1-20 residues
  SITE (1)..(480): This sequence may encompass 1-20 "(Gly)(Ser)(Gly)(Ser)m(Gly)" repeating units, wherein m = 1 to 20
  See specification as filed for detailed description of substitutions and preferred embodiments
GSGSSSSSSSSSSSSSSSSSSSSGGSGSSSSSSSSSSSSSSSSSSSSGGSGSSSSSSSSSSSSSSSSSSSSGGSGSSSSSSSSSSSSSSSSSSSSGGSGSSSSSSSSSSSSSSSSSSSSGGSGSSSSSSSSSSSSSSSSSSSSGGSGSSSSSSSSSSSSSSSSSSSSGGSGSSSSSSSSSSSSSSSSSSSSGGSGSSSSSSSSSSSSSSSSSSSSGGSGSSSSSSSSSSSSSSSSSSSSGGSGSSSSSSSSSSSSSSSSSSSSGGSGSSSSSSSSSSSSSSSSSSSSGGSGSSSSSSSSSSSSSSSSSSSSGGSGSSSSSSSSSSSSSSSSSSSSGGSGSSSSSSSSSSSSSSSSSSSSGGSGSSSSSSSSSSSSSSSSSSSSGGSGSSSSSSSSSSSSSSSSSSSSGGSGSSSSSSSSSSSSSSSSSSSSGGSGSSSSSSSSSSSSSSSSSSSSGGSGSSSSSSSSSSSSSSSSSSSSG

SEQ ID NO: 571 - protein, 460 aa, Artificial Sequence
  Description of Artificial Sequence: Synthetic polypeptide
  SITE (4)..(23): This region may encompass 1-20 residues
  SITE (27)..(46): This region may encompass 1-20 residues
  SITE (50)..(69): This region may encompass 1-20 residues
  SITE (73)..(92): This region may encompass 1-20 residues
  SITE (96)..(115): This region may encompass 1-20 residues
  SITE (119)..(138): This region may encompass 1-20 residues
  SITE (142)..(161): This region may encompass 1-20 residues
  SITE (165)..(184): This region may encompass 1-20 residues
  SITE (188)..(207): This region may encompass 1-20 residues
  SITE (211)..(230): This region may encompass 1-20 residues
  SITE (234)..(253): This region may encompass 1-20 residues
  SITE (257)..(276): This region may encompass 1-20 residues
  SITE (280)..(299): This region may encompass 1-20 residues
  SITE (303)..(322): This region may encompass 1-20 residues
  SITE (326)..(345): This region may encompass 1-20 residues
  SITE (349)..(368): This region may encompass 1-20 residues
  SITE (372)..(391): This region may encompass 1-20 residues
  SITE (395)..(414): This region may encompass 1-20 residues
  SITE (418)..(437): This region may encompass 1-20 residues
  SITE (441)..(460): This region may encompass 1-20 residues
  SITE (1)..(460): This sequence may encompass 1-20 "(Gly)(Gly)(Gly)(Ser)m" repeating units, wherein m = 1 to 20
  See specification as filed for detailed description of substitutions and preferred embodiments
GGGSSSSSSSSSSSSSSSSSSSSGGGSSSSSSSSSSSSSSSSSSSSGGGSSSSSSSSSSSSSSSSSSSSGGGSSSSSSSSSSSSSSSSSSSSGGGSSSSSSSSSSSSSSSSSSSSGGGSSSSSSSSSSSSSSSSSSSSGGGSSSSSSSSSSSSSSSSSSSSGGGSSSSSSSSSSSSSSSSSSSSGGGSSSSSSSSSSSSSSSSSSSSGGGSSSSSSSSSSSSSSSSSSSSGGGSSSSSSSSSSSSSSSSSSSSGGGSSSSSSSSSSSSSSSSSSSSGGGSSSSSSSSSSSSSSSSSSSSGGGSSSSSSSSSSSSSSSSSSSSGGGSSSSSSSSSSSSSSSSSSSSGGGSSSSSSSSSSSSSSSSSSSSGGGSSSSSSSSSSSSSSSSSSSSGGGSSSSSSSSSSSSSSSSSSSSGGGSSSSSSSSSSSSSSSSSSSSGGGSSSSSSSSSSSSSSSSSSSS

SEQ ID NO: 572 - protein, 100 aa, Artificial Sequence
  Description of Artificial Sequence: Synthetic polypeptide
  SITE (1)..(100): This sequence may encompass 1-50 "Gly Ser" repeating units
GSGSGSGSGSGSGSGSGSGSGSGSGSGSGSGSGSGSGSGSGSGSGSGSGSGSGSGSGSGSGSGSGSGSGSGSGSGSGSGSGSGSGSGSGSGSGSGSGSGS

SEQ ID NO: 573 - protein, 250 aa, Artificial Sequence
  Description of Artificial Sequence: Synthetic polypeptide
  SITE (1)..(250): This sequence may encompass 1-50 "Gly Ser Gly Gly Ser" repeating units
GSGGSGSGGSGSGGSGSGGSGSGGSGSGGSGSGGSGSGGSGSGGSGSGGSGSGGSGSGGSGSGGSGSGGSGSGGSGSGGSGSGGSGSGGSGSGGSGSGGSGSGGSGSGGSGSGGSGSGGSGSGGSGSGGSGSGGSGSGGSGSGGSGSGGSGSGGSGSGGSGSGGSGSGGSGSGGSGSGGSGSGGSGSGGSGSGGSGSGGSGSGGSGSGGSGSGGSGSGGSGSGGSGSGGSGSGGSGSGGSGSGGSGSGGS

SEQ ID NO: 574 - protein, 200 aa, Artificial Sequence
  Description of Artificial Sequence: Synthetic polypeptide
  SITE (1)..(200): This sequence may encompass 1-50 "Gly Gly Gly Ser" repeating units
GGGSGGGSGGGSGGGSGGGSGGGSGGGSGGGSGGGSGGGSGGGSGGGSGGGSGGGSGGGSGGGSGGGSGGGSGGGSGGGSGGGSGGGSGGGSGGGSGGGSGGGSGGGSGGGSGGGSGGGSGGGSGGGSGGGSGGGSGGGSGGGSGGGSGGGSGGGSGGGSGGGSGGGSGGGSGGGSGGGSGGGSGGGSGGGSGGGSGGGS

SEQ ID NO: 575 - protein, 250 aa, Artificial Sequence
  Description of Artificial Sequence: Synthetic polypeptide
  SITE (1)..(250): This sequence may encompass 1-50 "Gly Gly Gly Gly Ser" repeating units
GGGGSGGGGSGGGGSGGGGSGGGGSGGGGSGGGGSGGGGSGGGGSGGGGSGGGGSGGGGSGGGGSGGGGSGGGGSGGGGSGGGGSGGGGSGGGGSGGGGSGGGGSGGGGSGGGGSGGGGSGGGGSGGGGSGGGGSGGGGSGGGGSGGGGSGGGGSGGGGSGGGGSGGGGSGGGGSGGGGSGGGGSGGGGSGGGGSGGGGSGGGGSGGGGSGGGGSGGGGSGGGGSGGGGSGGGGSGGGGSGGGGSGGGGS

SEQ ID NO: 576 - protein, 6 aa, Artificial Sequence
  Description of Artificial Sequence: Synthetic His tag
  SITE (1)..(6): This sequence may encompass 3-6 residues
HHHHHH

SEQ ID NO: 577 - protein, 8 aa, Artificial Sequence
  Description of Artificial Sequence: Synthetic peptide
GGGSGGGS

SEQ ID NO: 578 - protein, 10 aa, Artificial Sequence
  Description of Artificial Sequence: Synthetic peptide
GGSGGSGGSG

1. An IL10Rα/IL2Rγ binding protein that specifically binds to IL10Rα and IL2Rγ, comprising an anti-IL10Rα V_{H}H antibody and an anti-IL2Rγ V_{H}H antibody, wherein,
(A) the anti-IL100Rα V_{H}H antibody comprises a complementarity determining region 1 (CDR1) comprising an amino acid sequence of SEQ ID NO:1 or SEQ ID NO:264, a CDR2 comprising an amino acid sequence of SEQ ID NO:2, and a CDR3 comprising an amino acid sequence of SEQ ID NO:3; and
wherein the anti-IL2Rγ V_{H}H antibody comprises:
i) a CDR1 comprising an amino acid sequence of SEQ ID NO:25 or SEQ ID NO:270, a CDR2 comprising an amino acid sequence of SEQ ID NO:26, and a CDR3 comprising an amino acid sequence of SEQ ID NO:27;
ii) a CDR1 comprising an amino acid sequence of SEQ ID NO:29 or SEQ ID NO:271, a CDR2 comprising an amino acid sequence of SEQ ID NO:30, and a CDR3 comprising an amino acid sequence of SEQ ID NO:31;
iii) a CDR1 comprising an amino acid sequence of SEQ ID NO:33 or SEQ ID NO:272, a CDR2 comprising an amino acid sequence of SEQ ID NO:34, and a CDR3 comprising an amino acid sequence of SEQ ID NO:35;
iv) a CDR1 comprising an amino acid sequence of SEQ ID NO:37 or SEQ ID NO:273, a CDR2 comprising an amino acid sequence of SEQ ID NO:38, and a CDR3 comprising an amino acid sequence of SEQ ID NO:39;
v) a CDR1 comprising an amino acid sequence of SEQ ID NO:41 or SEQ ID NO:274, a CDR2 comprising an amino acid sequence of SEQ ID NO:42, and a CDR3 comprising an amino acid sequence of SEQ ID NO:43; or
vi) a CDR1 comprising an amino acid sequence of SEQ ID NO:45 or SEQ ID NO:275, a CDR2 comprising an amino acid sequence of SEQ ID NO:46, and a CDR3 comprising an amino acid sequence of SEQ ID NO:47; or
(B) the anti-IL10Rα V_{H}H antibody comprises a complementarity determining region 1 (CDR1) comprising an amino acid sequence of SEQ ID NO:5 or SEQ ID NO:265, a CDR2 comprising an amino acid sequence of SEQ ID NO:6, and a CDR3 comprising an amino acid sequence of SEQ ID NO:7; and
wherein the anti-IL2Rγ V_{H}H antibody comprises:
i) a CDR1 comprising an amino acid sequence of SEQ ID NO:25 or SEQ ID NO:270, a CDR2 comprising an amino acid sequence of SEQ ID NO:26, and a CDR3 comprising an amino acid sequence of SEQ ID NO:27;
ii) a CDR1 comprising an amino acid sequence of SEQ ID NO:29 or SEQ ID NO:271, a CDR2 comprising an amino acid sequence of SEQ ID NO:30, and a CDR3 comprising an amino acid sequence of SEQ ID NO:31;
iii) a CDR1 comprising an amino acid sequence of SEQ ID NO:33 or SEQ ID NO:272, a CDR2 comprising an amino acid sequence of SEQ ID NO:34, and a CDR3 comprising an amino acid sequence of SEQ ID NO:35;
iv) a CDR1 comprising an amino acid sequence of SEQ ID NO:37 or SEQ ID NO:273, a CDR2 comprising an amino acid sequence of SEQ ID NO:38, and a CDR3 comprising an amino acid sequence of SEQ ID NO:39;
v) a CDR1 comprising an amino acid sequence of SEQ ID NO:41 or SEQ ID NO:274, a CDR2 comprising an amino acid sequence of SEQ ID NO:42, and a CDR3 comprising an amino acid sequence of SEQ ID NO:43; or
vi) a CDR1 comprising an amino acid sequence of SEQ ID NO:45 or SEQ ID NO:275, a CDR2 comprising an amino acid sequence of SEQ ID NO:46, and a CDR3 comprising an amino acid sequence of SEQ ID NO:47; or
(C) the anti-IL10Rα V_{H}H antibody comprises a complementarity determining region 1 (CDR1) comprising an amino acid sequence of SEQ ID NO:9 or SEQ ID NO:266, a CDR2 comprising an amino acid sequence of SEQ ID NO:10, and a CDR3 comprising an amino acid sequence of SEQ ID NO:11; and
wherein the anti-IL2Rγ V_{H}H antibody comprises:
i) a CDR1 comprising an amino acid sequence of SEQ ID NO:25 or SEQ ID NO:270, a CDR2 comprising an amino acid sequence of SEQ ID NO:26, and a CDR3 comprising an amino acid sequence of SEQ ID NO:27;
ii) a CDR1 comprising an amino acid sequence of SEQ ID NO:29 or SEQ ID NO:271, a CDR2 comprising an amino acid sequence of SEQ ID NO:30, and a CDR3 comprising an amino acid sequence of SEQ ID NO:31;
iii) a CDR1 comprising an amino acid sequence of SEQ ID NO:33 or SEQ ID NO:272, a CDR2 comprising an amino acid sequence of SEQ ID NO:34, and a CDR3 comprising an amino acid sequence of SEQ ID NO:35;
iv) a CDR1 comprising an amino acid sequence of SEQ ID NO:37 or SEQ ID NO:273, a CDR2 comprising an amino acid sequence of SEQ ID NO:38, and a CDR3 comprising an amino acid sequence of SEQ ID NO:39;
v) a CDR1 comprising an amino acid sequence of SEQ ID NO:41 or SEQ ID NO:274, a CDR2 comprising an amino acid sequence of SEQ ID NO:42, and a CDR3 comprising an amino acid sequence of SEQ ID NO:43; or
vi) a CDR1 comprising an amino acid sequence of SEQ ID NO:45 or SEQ ID NO:275, a CDR2 comprising an amino acid sequence of SEQ ID NO:46, and a CDR3 comprising an amino acid sequence of SEQ ID NO:47; or
(D) the anti-IL10Rα V_{H}H antibody comprises a complementarity determining region 1 (CDR1) comprising an amino acid sequence of SEQ ID NO:13 or SEQ ID NO:267, a CDR2 comprising an amino acid sequence of SEQ ID NO:14, and a CDR3 comprising an amino acid sequence of SEQ ID NO:15; and
wherein the anti-IL2Rγ V_{H}H antibody comprises:
i) a CDR1 comprising an amino acid sequence of SEQ ID NO:25 or SEQ ID NO:270, a CDR2 comprising an amino acid sequence of SEQ ID NO:26, and a CDR3 comprising an amino acid sequence of SEQ ID NO:27;
ii) a CDR1 comprising an amino acid sequence of SEQ ID NO:29 or SEQ ID NO:271, a CDR2 comprising an amino acid sequence of SEQ ID NO:30, and a CDR3 comprising an amino acid sequence of SEQ ID NO:31;
iii) a CDR1 comprising an amino acid sequence of SEQ ID NO:33 or SEQ ID NO:272, a CDR2 comprising an amino acid sequence of SEQ ID NO:34, and a CDR3 comprising an amino acid sequence of SEQ ID NO:35;
iv) a CDR1 comprising an amino acid sequence of SEQ ID NO:37 or SEQ ID NO:273, a CDR2 comprising an amino acid sequence of SEQ ID NO:38, and a CDR3 comprising an amino acid sequence of SEQ ID NO:39;
v) a CDR1 comprising an amino acid sequence of SEQ ID NO:41 or SEQ ID NO:274, a CDR2 comprising an amino acid sequence of SEQ ID NO:42, and a CDR3 comprising an amino acid sequence of SEQ ID NO:43; or
vi) a CDR1 comprising an amino acid sequence of SEQ ID NO:45 or SEQ ID NO:275, a CDR2 comprising an amino acid sequence of SEQ ID NO:46, and a CDR3 comprising an amino acid sequence of SEQ ID NO:47; or
(E) the anti-IL10Rα V_{H}H antibody comprises a complementarity determining region 1 (CDR1) comprising an amino acid sequence of SEQ ID NO:17 or SEQ ID NO:268, a CDR2 comprising an amino acid sequence of SEQ ID NO:18, and a CDR3 comprising an amino acid sequence of SEQ ID NO:19; and
wherein the anti-IL2Rγ V_{H}H antibody comprises:
i) a CDR1 comprising an amino acid sequence of SEQ ID NO:25 or SEQ ID NO:270, a CDR2 comprising an amino acid sequence of SEQ ID NO:26, and a CDR3 comprising an amino acid sequence of SEQ ID NO:27;
ii) a CDR1 comprising an amino acid sequence of SEQ ID NO:29 or SEQ ID NO:271, a CDR2 comprising an amino acid sequence of SEQ ID NO:30, and a CDR3 comprising an amino acid sequence of SEQ ID NO:31;
iii) a CDR1 comprising an amino acid sequence of SEQ ID NO:33 or SEQ ID NO:272, a CDR2 comprising an amino acid sequence of SEQ ID NO:34, and a CDR3 comprising an amino acid sequence of SEQ ID NO:35;
iv) a CDR1 comprising an amino acid sequence of SEQ ID NO:37 or SEQ ID NO:273, a CDR2 comprising an amino acid sequence of SEQ ID NO:38, and a CDR3 comprising an amino acid sequence of SEQ ID NO:39;
v) a CDR1 comprising an amino acid sequence of SEQ ID NO:41 or SEQ ID NO:274, a CDR2 comprising an amino acid sequence of SEQ ID NO:42, and a CDR3 comprising an amino acid sequence of SEQ ID NO:43; or
vi) a CDR1 comprising an amino acid sequence of SEQ ID NO:45 or SEQ ID NO:275, a CDR2 comprising an amino acid sequence of SEQ ID NO:46, and a CDR3 comprising an amino acid sequence of SEQ ID NO:47; or
(F) the anti-IL10Rα V_{H}H antibody comprises a complementarity determining region 1 (CDR1) comprising an amino acid sequence of SEQ ID NO:21 or SEQ ID NO:269, a CDR2 comprising an amino acid sequence of SEQ ID NO:22, and a CDR3 comprising an amino acid sequence of SEQ ID NO:23; and
wherein the anti-IL2Rγ V_{H}H antibody comprises:
i) a CDR1 comprising an amino acid sequence of SEQ ID NO:25 or SEQ ID NO:270, a CDR2 comprising an amino acid sequence of SEQ ID NO:26, and a CDR3 comprising an amino acid sequence of SEQ ID NO:27;
ii) a CDR1 comprising an amino acid sequence of SEQ ID NO:29 or SEQ ID NO:271, a CDR2 comprising an amino acid sequence of SEQ ID NO:30, and a CDR3 comprising an amino acid sequence of SEQ ID NO:31;
iii) a CDR1 comprising an amino acid sequence of SEQ ID NO:33 or SEQ ID NO:272, a CDR2 comprising an amino acid sequence of SEQ ID NO:34, and a CDR3 comprising an amino acid sequence of SEQ ID NO:35;
iv) a CDR1 comprising an amino acid sequence of SEQ ID NO:37 or SEQ ID NO:273, a CDR2 comprising an amino acid sequence of SEQ ID NO:38, and a CDR3 comprising an amino acid sequence of SEQ ID NO:39;
v) a CDR1 comprising an amino acid sequence of SEQ ID NO:41 or SEQ ID NO:274, a CDR2 comprising an amino acid sequence of SEQ ID NO:42, and a CDR3 comprising an amino acid sequence of SEQ ID NO:43; or
vi) a CDR1 comprising an amino acid sequence of SEQ ID NO:45 or SEQ ID NO:275, a CDR2 comprising an amino acid sequence of SEQ ID NO:46, and a CDR3 comprising an amino acid sequence of SEQ ID NO:47.

2. (canceled)

3. (canceled)

4. The IL10Rα/IL2Rγ binding protein of claim 1, wherein the anti-L10Rα V_{H}H antibody comprises a sequence having at least 90% identity to a sequence of any one of DR235 (SEQ ID NO:4), DR236 (SEQ ID NO:8), DR237 (SEQ ID NO:12), DR239 (SEQ ID NO:16), DR240 (SEQ ID NO:20), and DR241 (SEQ ID NO:24).

5. (canceled)

6. (canceled)

7. The IL10Rα/IL2Rγ binding protein of claim 1, wherein the anti-IL10Rα V_{H}H antibody comprises a sequence having at least 90% identity to a sequence of any one of DR229 (SEQ ID NO:28), DR230 (SEQ ID NO:32), DR231 (SEQ ID NO:36), DR232 (SEQ ID NO:40), DR233 (SEQ ID NO:44), and DR234 (SEQ ID NO:48).

8. The IL10Rα/IL2Rγ binding protein of claim 1, wherein the anti-IL10Rα V_{H}H antibody is at the N-terminus and the anti-IL2Rγ V_{H}H antibody is at the C-terminus.

9. The IL10Rα/IL2Rγ binding protein of claim 8, wherein the binding protein comprises a sequence having at least 90% identity to a sequence of any one of SEQ ID NOS:49-59.

10. The IL10Rα/IL2Rγ binding protein of claim 1, wherein the anti-IL2Rγ V_{H}H antibody is at the N-terminus and the anti-IL10Rα V_{H}H antibody is at the C-terminus.

11. The IL10Rα/IL2Rγ binding protein of claim 10, wherein the binding protein comprises at least 90% identity to a sequence of any one of SEQ ID NOS:60 and 61.

12. The IL10Rα/IL2Rγ binding protein of claim 1, wherein the anti-IL10Rα V_{H}H antibody and the anti-IL2Rγ V_{H}H antibody are joined by a peptide linker.

13. The IL10Rα/IL2Rγ binding protein of claim 12, wherein the peptide linker comprises between 1 and 50 amino acids.

14. The IL10Rα/IL2Rγ binding protein of claim 1, wherein the binding protein comprises a sequence with at least 90% (e.g., 90%, 91%, 92%, 93%, 91%, 95%, 96%, 97%, 98%, 99%, 100%) identity to a sequence of any one of SEQ ID NOS:49-61 or 96-179, optionally without a HHHHHH sequence.

15. The IL10Rα/IL2Rγ binding protein of claim 1, wherein the binding protein is conjugated to an Fc polypeptide or an Fc domain.

16. The IL10Rα/IL2Rγ binding protein of claim 15, wherein the Fc polypeptide or the Fc domain is from an IgG1, IgG2, IgG3 or IgG4.

17. The IL10Rα/IL2Rγ binding protein of claim 16, wherein the IL10Rα/IL2Rγ binding protein comprises SEQ ID NO: 556 or SEQ ID NO:558.

18. The IL10Rα/IL2Rγ binding protein of claim 1, wherein the binding protein is PEGylated.

19. An IL10Rα/IL2Rγ binding protein that specifically binds to IL10Rα and IL2Rγ, comprising an anti-IL10Rα V_{H}H antibody and an anti-IL2Rγ V_{H}H antibody, wherein the IL10Rα/IL2Rγ binding protein is linked to a Fc polypeptide or a Fc domain from an IgG1, IgG2, IgG3 or IgG4.

20. A heterodimeric IL10Rα binding protein/IL2Rγ binding protein pair, the heterodimeric IL10Rα binding protein/IL2Rγ binding protein pair comprising a first polypeptide of the formula #1:
anti-IL10Rα V_{H}H antibody-L1ₐ-UH1-Fc1 [1]
and a second polypeptide of the formula #2:
anti-IL2Rγ V_{H}H antibody-L2_{b}-UH2-Fc2 [2]
wherein:
L1 and L2 are GSA linkers and a and b are independently selected from 0 (absent) or 1 (present);
UH1 and UH2 are each an upper hinge domain of human immunoglobulin independently selected from the group consisting of the IgG1, IgG2, IgG3 and IgG4 upper hinge, optionally comprising the amino acid substitution C220S (EU numbering);
Fc1 is a polypeptide comprising the lower hinge, CH2 and CH3 domains of a human immunoglobulin selected from the group consisting of IgG1, IgG2, IgG3 and IgG4, comprising one or more amino acid substitutions promote heterodimerization with Fc2, and
FC2 is a polypeptide comprising the lower hinge, CH2 and CH3 domains of a human immunoglobulin selected from the group consisting of IgG1, IgG2, IgG3 and IgG4, comprising one or more amino acid substitutions promote heterodimerization with Fc1, and
wherein the polypeptide of formula 1 and the polypeptide of formula 2 are linked by at least one interchain disulfide bond, and wherein
(A) the anti-IL100Rα V_{H}H antibody comprises a complementarity determining region 1 (CDR1) comprising an amino acid sequence of SEQ ID NO:1 or SEQ ID NO:264, a CDR2 comprising an amino acid sequence of SEQ ID NO:2, and a CDR3 comprising an amino acid sequence of SEQ ID NO:3; and
wherein the anti-IL2Rγ V_{H}H antibody comprises:
i) a CDR1 comprising an amino acid sequence of SEQ ID NO:25 or SEQ ID NO:270, a CDR2 comprising an amino acid sequence of SEQ ID NO:26, and a CDR3 comprising an amino acid sequence of SEQ ID NO:27;
ii) a CDR1 comprising an amino acid sequence of SEQ ID NO:29 or SEQ ID NO:271, a CDR2 comprising an amino acid sequence of SEQ ID NO:30, and a CDR3 comprising an amino acid sequence of SEQ ID NO:31;
iii) a CDR1 comprising an amino acid sequence of SEQ ID NO:33 or SEQ ID NO:272, a CDR2 comprising an amino acid sequence of SEQ ID NO:34, and a CDR3 comprising an amino acid sequence of SEQ ID NO:35;
iv) a CDR1 comprising an amino acid sequence of SEQ ID NO:37 or SEQ ID NO:273, a CDR2 comprising an amino acid sequence of SEQ ID NO:38, and a CDR3 comprising an amino acid sequence of SEQ ID NO:39;
v) a CDR1 comprising an amino acid sequence of SEQ ID NO:41 or SEQ ID NO:274, a CDR2 comprising an amino acid sequence of SEQ ID NO:42, and a CDR3 comprising an amino acid sequence of SEQ ID NO:43; or
vi) a CDR1 comprising an amino acid sequence of SEQ ID NO:45 or SEQ ID NO:275, a CDR2 comprising an amino acid sequence of SEQ ID NO:46, and a CDR3 comprising an amino acid sequence of SEQ ID NO:47; or
(B) the anti-IL10Rα V_{H}H antibody comprises a complementarity determining region 1 (CDR1) comprising an amino acid sequence of SEQ ID NO:5 or SEQ ID NO:265, a CDR2 comprising an amino acid sequence of SEQ ID NO:6, and a CDR3 comprising an amino acid sequence of SEQ ID NO:7; and
wherein the anti-IL2Rγ V_{H}H antibody comprises:
i) a CDR1 comprising an amino acid sequence of SEQ ID NO:25 or SEQ ID NO:270, a CDR2 comprising an amino acid sequence of SEQ ID NO:26, and a CDR3 comprising an amino acid sequence of SEQ ID NO:27;
ii) a CDR1 comprising an amino acid sequence of SEQ ID NO:29 or SEQ ID NO:271, a CDR2 comprising an amino acid sequence of SEQ ID NO:30, and a CDR3 comprising an amino acid sequence of SEQ ID NO:31;
iii) a CDR1 comprising an amino acid sequence of SEQ ID NO:33 or SEQ ID NO:272, a CDR2 comprising an amino acid sequence of SEQ ID NO:34, and a CDR3 comprising an amino acid sequence of SEQ ID NO:35;
iv) a CDR1 comprising an amino acid sequence of SEQ ID NO:37 or SEQ ID NO:273, a CDR2 comprising an amino acid sequence of SEQ ID NO:38, and a CDR3 comprising an amino acid sequence of SEQ ID NO:39;
v) a CDR1 comprising an amino acid sequence of SEQ ID NO:41 or SEQ ID NO:274, a CDR2 comprising an amino acid sequence of SEQ ID NO:42, and a CDR3 comprising an amino acid sequence of SEQ ID NO:43; or
vi) a CDR1 comprising an amino acid sequence of SEQ ID NO:45 or SEQ ID NO:275, a CDR2 comprising an amino acid sequence of SEQ ID NO:46, and a CDR3 comprising an amino acid sequence of SEQ ID NO:47; or
(C) the anti-IL10Rα V_{H}H antibody comprises a complementarity determining region 1 (CDR1) comprising an amino acid sequence of SEQ ID NO:9 or SEQ ID NO:266, a CDR2 comprising an amino acid sequence of SEQ ID NO:10, and a CDR3 comprising an amino acid sequence of SEQ ID NO:11; and
wherein the anti-IL2Rγ V_{H}H antibody comprises:
i) a CDR1 comprising an amino acid sequence of SEQ ID NO:25 or SEQ ID NO:270, a CDR2 comprising an amino acid sequence of SEQ ID NO:26, and a CDR3 comprising an amino acid sequence of SEQ ID NO:27;
ii) a CDR1 comprising an amino acid sequence of SEQ ID NO:29 or SEQ ID NO:271, a CDR2 comprising an amino acid sequence of SEQ ID NO:30, and a CDR3 comprising an amino acid sequence of SEQ ID NO:31;
iii) a CDR1 comprising an amino acid sequence of SEQ ID NO:33 or SEQ ID NO:272, a CDR2 comprising an amino acid sequence of SEQ ID NO:34, and a CDR3 comprising an amino acid sequence of SEQ ID NO:35;
iv) a CDR1 comprising an amino acid sequence of SEQ ID NO:37 or SEQ ID NO:273, a CDR2 comprising an amino acid sequence of SEQ ID NO:38, and a CDR3 comprising an amino acid sequence of SEQ ID NO:39;
v) a CDR1 comprising an amino acid sequence of SEQ ID NO:41 or SEQ ID NO:274, a CDR2 comprising an amino acid sequence of SEQ ID NO:42, and a CDR3 comprising an amino acid sequence of SEQ ID NO:43; or
vi) a CDR1 comprising an amino acid sequence of SEQ ID NO:45 or SEQ ID NO:275, a CDR2 comprising an amino acid sequence of SEQ ID NO:46, and a CDR3 comprising an amino acid sequence of SEQ ID NO:47; or
(D) the anti-IL10Rα V_{H}H antibody comprises a complementarity determining region 1 (CDR1) comprising an amino acid sequence of SEQ ID NO:13 or SEQ ID NO:267, a CDR2 comprising an amino acid sequence of SEQ ID NO:14, and a CDR3 comprising an amino acid sequence of SEQ ID NO:15; and
wherein the anti-IL2Rγ V_{H}H antibody comprises:
i) a CDR1 comprising an amino acid sequence of SEQ ID NO:25 or SEQ ID NO:270, a CDR2 comprising an amino acid sequence of SEQ ID NO:26, and a CDR3 comprising an amino acid sequence of SEQ ID NO:27;
ii) a CDR1 comprising an amino acid sequence of SEQ ID NO:29 or SEQ ID NO:271, a CDR2 comprising an amino acid sequence of SEQ ID NO:30, and a CDR3 comprising an amino acid sequence of SEQ ID NO:31;
iii) a CDR1 comprising an amino acid sequence of SEQ ID NO:33 or SEQ ID NO:272, a CDR2 comprising an amino acid sequence of SEQ ID NO:34, and a CDR3 comprising an amino acid sequence of SEQ ID NO:35;
iv) a CDR1 comprising an amino acid sequence of SEQ ID NO:37 or SEQ ID NO:273, a CDR2 comprising an amino acid sequence of SEQ ID NO:38, and a CDR3 comprising an amino acid sequence of SEQ ID NO:39;
v) a CDR1 comprising an amino acid sequence of SEQ ID NO:41 or SEQ ID NO:274, a CDR2 comprising an amino acid sequence of SEQ ID NO:42, and a CDR3 comprising an amino acid sequence of SEQ ID NO:43; or
vi) a CDR1 comprising an amino acid sequence of SEQ ID NO:45 or SEQ ID NO:275, a CDR2 comprising an amino acid sequence of SEQ ID NO:46, and a CDR3 comprising an amino acid sequence of SEQ ID NO:47; or
(E) the anti-IL10Rα V_{H}H antibody comprises a complementarity determining region 1 (CDR1) comprising an amino acid sequence of SEQ ID NO:17 or SEQ ID NO:268, a CDR2 comprising an amino acid sequence of SEQ ID NO:18, and a CDR3 comprising an amino acid sequence of SEQ ID NO:19; and
wherein the anti-IL2Rγ V_{H}H antibody comprises:
i) a CDR1 comprising an amino acid sequence of SEQ ID NO:25 or SEQ ID NO:270, a CDR2 comprising an amino acid sequence of SEQ ID NO:26, and a CDR3 comprising an amino acid sequence of SEQ ID NO:27;
ii) a CDR1 comprising an amino acid sequence of SEQ ID NO:29 or SEQ ID NO:271, a CDR2 comprising an amino acid sequence of SEQ ID NO:30, and a CDR3 comprising an amino acid sequence of SEQ ID NO:31;
iii) a CDR1 comprising an amino acid sequence of SEQ ID NO:33 or SEQ ID NO:272, a CDR2 comprising an amino acid sequence of SEQ ID NO:34, and a CDR3 comprising an amino acid sequence of SEQ ID NO:35;
iv) a CDR1 comprising an amino acid sequence of SEQ ID NO:37 or SEQ ID NO:273, a CDR2 comprising an amino acid sequence of SEQ ID NO:38, and a CDR3 comprising an amino acid sequence of SEQ ID NO:39;
v) a CDR1 comprising an amino acid sequence of SEQ ID NO:41 or SEQ ID NO:274, a CDR2 comprising an amino acid sequence of SEQ ID NO:42, and a CDR3 comprising an amino acid sequence of SEQ ID NO:43; or
vi) a CDR1 comprising an amino acid sequence of SEQ ID NO:45 or SEQ ID NO:275, a CDR2 comprising an amino acid sequence of SEQ ID NO:46, and a CDR3 comprising an amino acid sequence of SEQ ID NO:47; or
(F) the anti-IL10Rα V_{H}H antibody comprises a complementarity determining region 1 (CDR1) comprising an amino acid sequence of SEQ ID NO:21 or SEQ ID NO:269, a CDR2 comprising an amino acid sequence of SEQ ID NO:22, and a CDR3 comprising an amino acid sequence of SEQ ID NO:23; and
wherein the anti-IL2Rγ V_{H}H antibody comprises:
i) a CDR1 comprising an amino acid sequence of SEQ ID NO:25 or SEQ ID NO:270, a CDR2 comprising an amino acid sequence of SEQ ID NO:26, and a CDR3 comprising an amino acid sequence of SEQ ID NO:27;
ii) a CDR1 comprising an amino acid sequence of SEQ ID NO:29 or SEQ ID NO:271, a CDR2 comprising an amino acid sequence of SEQ ID NO:30, and a CDR3 comprising an amino acid sequence of SEQ ID NO:31;
iii) a CDR1 comprising an amino acid sequence of SEQ ID NO:33 or SEQ ID NO:272, a CDR2 comprising an amino acid sequence of SEQ ID NO:34, and a CDR3 comprising an amino acid sequence of SEQ ID NO:35;
iv) a CDR1 comprising an amino acid sequence of SEQ ID NO:37 or SEQ ID NO:273, a CDR2 comprising an amino acid sequence of SEQ ID NO:38, and a CDR3 comprising an amino acid sequence of SEQ ID NO:39;
v) a CDR1 comprising an amino acid sequence of SEQ ID NO:41 or SEQ ID NO:274, a CDR2 comprising an amino acid sequence of SEQ ID NO:42, and a CDR3 comprising an amino acid sequence of SEQ ID NO:43; or
vi) a CDR1 comprising an amino acid sequence of SEQ ID NO:45 or SEQ ID NO:275, a CDR2 comprising an amino acid sequence of SEQ ID NO:46, and a CDR3 comprising an amino acid sequence of SEQ ID NO:47; or
(G) the anti-IL10Rα V_{H}H antibody comprises:
a CDR1 having at least 90% (e.g., 91%, 92%, 93%, 94%, 95%, 96%, 97%, 98%, 99%, or 100%) sequence identity, or having 0, 1, 2, or 3 amino acid changes, optionally conservative amino acid changes relative, to the sequence of any CDR1 in a row of Table 10;
a CDR2 having at least 90% (e.g., 91%, 92%, 93%, 94%, 95%, 96%, 97%, 98%, 99%, or 100%) sequence identity, or having 0, 1, 2, or 3 amino acid changes, optionally conservative amino acid changes relative, to the sequence of any CDR2 in a row of Table 10; and
a CDR3 having at least 90% (e.g., 91%, 92%, 93%, 94%, 95%, 96%, 97%, 98%, 99%, or 100%) sequence identity, or having 0, 1, 2, or 3 amino acid changes, optionally conservative amino acid changes relative, to the sequence of any CDR3 listed in Table 10; and
the anti-IL2Rγ V_{H}H antibody comprises:
a CDR1 having at least 90% (e.g., 91%, 92%, 93%, 94%, 95%, 96%, 97%, 98%, 99%, or 100%) sequence identity, or having 0, 1, 2, or 3 amino acid changes, optionally conservative amino acid changes relative, to the sequence of any CDR1 listed in Table 11 or Table 12;
a CDR2 having at least 90% (e.g., 91%, 92%, 93%, 94%, 95%, 96%, 97%, 98%, 99%, or 100%) sequence identity, or having 0, 1, 2, or 3 amino acid changes, optionally conservative amino acid changes relative, to the sequence of any CDR2 listed in Table 11 or Table 12; and
a CDR3 having at least 90% (e.g., 91%, 92%, 93%, 94%, 95%, 96%, 97%, 98%, 99%, or 100%) sequence identity, or having 0, 1, 2, or 3 amino acid changes, optionally conservative amino acid changes relative, to the sequence of any CDR3 listed in Table 11 or Table 12.

21. An isolated nucleic acid encoding the IL10Rα/IL2Rγ binding protein of claim 1.

22. An expression vector comprising the nucleic acid of claim 21.

23. An isolated host cell comprising the vector of claim 22.

24. A pharmaceutical composition comprising the IL10Rα/IL2Rγ binding protein of claim 1 and a pharmaceutically acceptable carrier.

25. A method of treating a neoplastic disease in a subject in need thereof, comprising administering to the subject a therapeutically effective amount of an IL10Rα/IL2Rγ binding protein of claim 1.

26-28. (canceled)

29. A method of treating an autoimmune or inflammatory disease, disorder, or condition in a subject in need thereof, comprising administering to the subject a therapeutically effective amount of an IL10Rα/IL2Rγ binding protein of claim 1.

30-33. (canceled)

34. A method to selectively induce activity in one or more of a first cell type over one or more of a second cell type, comprising contacting a population of cells comprising both the first and second cell types with an IL10Ra/IL2Rγ binding protein of claim 1, thereby selectively inducing activity in one or more of the first cell type over one or more of the second cell type.

35-42. (canceled)
